(19) United States
(12) Patent Application Publication
(10) Pub. No.: US 2007/0248584 A1
(43) Pub. Date: Oct. 25, 2007

(54) Immunomodulating Compositions, Uses Therefore and Processes for Their Production

(75) Inventor: Stephen John Kent, Camberwell (AU)

Correspondence Address: PROSKAUER ROSE LLP, 1001 PENNSYLVANIA AVE, N.W.,, SUITE 400 SOUTH, WASHINGTON, DC, 20004, US

(73) Assignee: The University of Melbourne, Parkville Victoria (AU)

(21) Appl. No.: 10/560,069

(22) PCT Filed: Jun. 10, 2004
(86) PCT No.: PCT/AU04/00775

§ 371 Date: Mar. 14, 2007

(30) Foreign Application Priority Data
Jun. 10, 2003 (AU) 2003902875
Mar. 25, 2004 (AU) 2004901589

(51) Int. Cl. A61K 45/00; A61K 38/00; A61P 35/00; C12P 1/00; C12N 5/06; A61K 38/04

(52) U.S. Cl. 424/93.72; 424/278.1; 424/93.7; 435/325; 435/41; 514/14; 530/326; 530/328

(57) ABSTRACT

The present invention relates to the use of at least one set of peptides in compositions and methods for modulating an immune response to one or more polypeptide antigens. In certain embodiments, the sequences of a respective set of peptides are derived in whole, or in part, from a single polypeptide antigen. Individual peptides of a respective peptide set comprise different portions of an amino acid sequence corresponding to a single polypeptide antigen and display partial sequence identity or similarity to at least one other peptide of the same set of peptides. The invention also extends to methods of using such peptides in a range of preventive, diagnostic and therapeutic applications. Additionally, the invention relates to the use of uncultured antigen-presenting cells or their precursors, which have not been subjected to activating conditions, and which have been contacted with an antigen, in methods and compositions for modulating an immune response in a recipient of those cells.

### FIELD OF THE INVENTION

[0001] THIS INVENTION relates generally to modulation of immune responses. More particularly, the present invention relates to the use of at least one set of peptides in compositions and methods for modulating an immune response to one or more polypeptide antigens. In certain embodiments, the sequences of a respective set of peptides are derived in whole, or in part, from a single polypeptide antigen. Individual peptides of a respective peptide set comprise different portions of an amino acid sequence corresponding to a single polypeptide antigen and display partial sequence identity or similarity to at least one other peptide of the same set of peptides. The invention also extends to methods of using such peptides in a range of preventive, diagnostic and therapeutic applications. Additionally, the invention relates to the use of uncultured antigen-presenting cells or their precursors, which have not been subjected to activating conditions, and which have been contacted with an antigen, in methods and compositions for modulating an immune response in a recipient of those cells.

[0002] Bibliographic details of various publications numerically referred to in this specification are collected at the end of the description.

### BACKGROUND OF THE INVENTION

[0003] Since its discovery almost 20 years ago, the human immunodeficiency virus type-l (HIV-1) has claimed more than 22 million lives and is continuing to devastate communities worldwide (1). Forty-two million people are currently living with HIV-1 and, despite efforts to modify high-risk behaviour, an estimated 5 million new infections occur yearly (2). Similarly, Hepatitis C virus (HCV) and Hepatitis B virus infections result in chronic liver damage and hepatocellular damage in millions of people worldwide. Safe and effective preventative or therapeutic vaccines for these viruses are desperately needed. Additionally, it is now believed that immune protection from, or clearance of, many cancers requires specific T cell responses.

[0004] The elimination of persistent intracellular pathogens such as replicating viruses generally requires the mobilisation of cell-mediated immunity (CMI). CD8+ cytotoxic T lymphocytes (CTL) are the primary effector cells of CMI; they kill viral-infected cells by recognising viral peptides presented on the cell surface in the context of MHC class I molecules. Prior to the appearance of virus-specific antibodies, a robust HIV-1-specific CTL response temporally correlates with reduced viremia during the acute stage of HIV-1 infection (3, 4). Furthermore, strong CTL responses are associated with reduced HIV-1 viremia during chronic infection (5, 6), whereas a decline in HIV-1-specific CTL is linked to rapid progression to AIDS (4, 7-9). Similarly, clearance of HCV infections is generally thought to be assisted by virus-specific T cell responses.

[0005] There are no effective vaccines against HIV-1, HCV or cancers. Early HIV-1 vaccine strategies were based on whole-inactivated virus and recombinant structural proteins such as the envelope (env) glycoprotein. Non-human primate models revealed only limited strain-specific protection by these vaccines against pathogenic simian inmmunodeficiency virus (SIV) and highly pathogenic SHIV (SIV-HIV-1 chimeric) challenges (10-13). The first human phase III trials also failed to show efficacy (14).

[0006] Particle- and recombinant whole protein-based vaccines, although safe, favour the generation of antibodies that are insufficient for protection against many chronic viral pathogens. Alternatively, intracellularly expressed antigens are subsequently more likely to induce CTL responses. Live-attenuated viruses generate potent cell-mediated immunity (CMI) responses, however their clinical safety is of concern (15). Consequently, much focus has shifted toward genetically engineered vectors (such as DNA plasmids and poxviruses) expressing HIV-l/SIV genes (such as env, gag andpol) or HCV genes (16).

[0007] It is not known which immune-target antigens are protective, but a large breadth of T cell responses has been shown to reduce the opportunity for viral escape mutations to arise (17). It is this large breadth of potential epitopes, however, which renders the construct of large vectors frequently difficult and as well as being complicated by potential safety issues. Concerns have been raised about the potential ability of DNA vaccines to integrate with host DNA, as well as the safety of viral vector vaccines in immunocompromised hosts. These represent the significant regulatory hurdles for these recombinant vaccines.

[0008] Also, despite significant advances towards understanding how T and linear B cell epitopes are processed and presented to the immune system, the full potential of epitope-based vaccines has not been fully exploited. The main reason for this is the large number of different T cell epitopes, which must be identified for inclusion into such vaccines to cover the extreme human leucocyte antigen (HLA) polymorphism in the human population.

[0009] Infusion of whole antigen-pulsed or single epitope-pulsed cultured antigen presenting cells (APC) has previously been reported to be immunogenic in mouse models (22-27). However, other reports in inbred mouse models suggest the infusion of cells pulsed with single peptides may even be tolerogenic (induces a state of tolerance to the antigen which would be counterproductive for a vaccine) (28-31).

### SUMMARY OF THE INVENTION

[0010] The present invention discloses the discovery that autologous cells, which have been contacted with overlapping peptides of a viral polypeptide antigen of interest produce a strong immunogenic response in an outbred population that protects against subsequent viral challenge. The present inventors propose that similar protective responses would be achieved using systemic administration of the overlapping peptides per se. The use of multiple overlapping peptides provides several advantages, including reducing the emergence of escape mutants and the facile production of peptide-based immunogenic compositions without prior knowledge of any epitopes. In this regard, the sequence overlap between peptides reduces or prevents loss of potential epitopes, which broadens the immunological coverage of the composition to cover potentially the diversity in the major histocompatability complex (MHC) across an outbred population.

[0011] Accordingly, in one aspect of the present invention, there is provided at least one set of peptides for modulating an immune response to one or more polypeptides of interest. Individual peptides of a respective set comprise different portions of an amino acid sequence corresponding to a single polypeptide of interest (e.g., particular pathogenic regions of a polypeptide), and display partial sequence identity or similarity to at least one other peptide of the same set of peptides. In certain embodiments, at least 2, 3, 4, 5, 6 or 7 sets of peptides are employed, wherein peptide sequences in each set are derived from a distinct polypeptide of interest.

[0012] The partial sequence identity or similarity is typically contained at one or both ends of an individual peptide. Suitably, at one or both of these ends there are at least 4, 5, 6, 7, 8, 9, 10, 11, 12, 13, 14 contiguous amino acid residues whose sequence is identical or similar to an amino acid sequence contained within at least one other of the peptides.

[0013] In certain embodiments, the peptide is at least 6, 7, 8, 9, 10, 11, 12, 13, 14, 15, 20, 25, 30 amino acid residues in length and suitably no more than about 500, 200, 100, 80, 60, 50, 40 amino acid residues in length. Suitably, the length of the peptides is selected to enhance the production of a cytolytic T lymphocyte response (e.g., peptides of about 8 to about 10 amino acids in length), or a T helper lymphocyte response (e.g., peptides of about 12 to about 20 amino acids in length).

[0014] In certain embodiments, the peptide sequences are derived from at least about 30, 40, 50, 60, 70, 80, 90, 91, 92, 93, 94. 95, 96, 97, 98, 99% of the sequence corresponding to the polypeptide of interest.

[0015] The polypeptide of interest is suitably an antigen selected from a protein antigen, an antigen expressed by cancer cells, a particulate antigen, an autoantigen, an autoantigen or an allergen, or an immune complex. In certain embodiments, the polypeptide of interest is a disease- or condition-associated polypeptide such as but not limited to a polypeptide produced by a pathogenic organism or a cancer. Examples of pathogenic organisms include, but are not restricted to, yeast, viruses, bacteria, helminths, protozoans and mycoplasmas. Examples of cancers include, but are not restricted to, melanoma, lung cancer, breast cancer, cervical cancer, prostate cancer, colon cancer, pancreatic cancer, stomach cancer, bladder cancer, kidney cancer, post transplant lymphoproliferative disease (PTLD), Hodgkin's Lymphoma and the like.

[0016] In another aspect, the invention provides antigen-presenting cells or their precursors which have been contacted with a set of peptides as broadly described above for a time and under conditions sufficient for the peptides or processed forms thereof to be presented by the antigen-presenting cells or by their precursors.

[0017] In a related aspect, the invention provides a process for producing antigen-presenting cells for modulating an immune response to a polypeptide of interest. The process generally comprises contacting antigen-presenting cells or their precursors with at least one set of peptides as broadly described above for a time and under conditions sufficient for the peptides or processed form thereof to be presented by the antigen-presenting cells or by their precursors. Suitably, when precursors are used, the precursors are cultured for a time and under conditions sufficient to differentiate antigen-presenting cells from the precursors.

[0018] In some embodiments, the or each set of peptides is contacted with substantially purified antigen-presenting cells or their precursors. In other embodiments, the or each set of peptides is contacted with a heterogeneous population of antigen-presenting cells or their precursors. In these embodiments, the heterogenous pool of cells can be blood or peripheral blood mononuclear cells. Typically, the antigen-presenting cells or their precursors are selected from monocytes, macrophages, cells of myeloid lineage, B cells, dendritic cells or Langerhans cells. In still other embodiments, the or each set of peptides is contacted with an uncultured population of antigen-presenting cells or their precursors. The population can be homogenous or heterogeneous, illustrative examples of which include whole blood, fresh blood, or fractions thereof such as, but not limited to, peripheral blood mononuclear cells, buffy coat fractions of whole blood, packed red cells, irradiated blood, dendritic cells, monocytes, macrophages, neutrophils, lymphocytes, natural killer cells and natural killer T cells.

[0019] The antigen-presenting cells broadly described above are also useful for producing lymphocytes, including T lymphocytes and B lymphocytes, for modulating an immune response to a specified antigen or group of antigens. Accordingly, in yet another aspect, the invention provides a method for producing antigen-specific lymphocytes. The method comprises contacting a population of lymphocytes, or their precursors, with an antigen-presenting cell as broadly described above for a time and under conditions sufficient to produce the antigen-specific lymphocytes that modulate an immune response to at least one polypeptide from which the overlapping peptides were derived.

[0020] In yet another aspect, the invention contemplates a composition comprising at least one set of peptides, or the antigen-presenting cells, or the lymphocytes, as broadly described above, and a pharmaceutically acceptable carrier and/or diluent. In certain embodiments, the composition may further comprise an adjuvant or compounds that stabilise the peptides or antigens against degradation by host enzymes.

[0021] In yet another aspect, the invention embraces a method for modulating an immune response to a polypeptide of interest, comprising administering to a patient in need of such treatment at least one set of peptides, or the antigen-presenting cells, or the lymphocytes, or the composition as broadly described above for a time and under conditions sufficient to modulate the immune response.

[0022] In a related aspect, the invention encompasses a method for treatment and/or prophylaxis of a disease or condition associated with the presence of a polypeptide of interest, comprising administering to a patient in need of such treatment or prophylaxis an effective amount of at least one set of peptides, or the antigen-presenting cells, or the lymphocytes, or the composition as broadly described above. In some embodiments, peptides or antigen-presenting cells or the lymphocytes are administered systemically, typically by injection.

[0023] In still yet another aspect, the invention contemplates the use of at least one set of peptides, or of the antigen-presenting cells, or of the lymphocytes, as broadly described above, in the preparation of a medicament for modulating an immune response to a polypeptide of interest or for treating or preventing a disease or condition associated with the presence of a polypeptide of interest.

[0024] The present invention also discloses the discovery that it is not necessary to culture a population of antigen-presenting cells or their precursors to expand that population prior to contacting it with a target antigen so that the contacted population is useful for modulating an immune response to the target antigen in a suitable recipient. Instead, the present inventors have unexpectedly discovered that uncultured antigen-presenting cells or their precursors, when contacted with an antigen that corresponds to a target antigen, are sufficient to modulate an immune response to the target antigen. The use of uncultured antigen-presenting cells or their precursors circumvents the need for expensive culturing and cell processing facilities and, in certain desirable embodiments, provides much faster vaccination regimens, as compared to current protocols. Additionally, the present inventors have discovered that it is not necessary to incubate the uncultured antigen-presenting cells under conditions that lead to their activation, in order to effectively modulate the immune response to the target antigen, which further reduces the number of process steps and manipulations.

[0025] Accordingly, in another aspect, the present invention features a composition of matter for modulating an immune response in a subject to a target antigen, the composition comprising uncultured antigen-presenting cells or their precursors, which have not been subjected to activating conditions, and which have been contacted with an antigen corresponding to the target antigen for a time (e.g., from about 1 minute to about 5 days) and under conditions sufficient to express a processed or modified form of the antigen for presentation to the subject's immune system (e.g., T lymphocytes). Illustrative examples of uncultured cells include whole blood, fresh blood, or fractions thereof such as but not limited to peripheral blood mononuclear cells, buffy coat fractions of whole blood, packed red cells, irradiated blood, dendritic cells, monocytes, macrophages, neutrophils, lymphocytes, natural killer cells and natural killer T cells.

[0026] The antigen corresponding to the target antigen can be of any type including, for example, nucleic acids, peptides, hormones, whole protein antigens, cellular material (e.g., live or inactivated cancer cells), particulate matter such as, but not limited to, cell debris, apoptotic cells, lipid aggregates such as liposomes, membranous vehicles, microspheres, heat aggregated proteins, virosomes, virus-like particles and whole organisms including, for example, bacteria, mycobacteria, viruses, fungi, protozoa or parts thereof. In some embodiments, the antigen is selected from a proteinaceous molecule or a nucleic acid molecule. In some embodiments, the uncultured cells are contacted with at two or more antigens. In illustrative examples of this type, the antigens are in the form of overlapping or non-overlapping peptides or one or more polynucleotides from which the peptides are expressible.

[0027] In a related aspect, the invention extends to the use of uncultured antigen-presenting cells or their precursors in the preparation of a medicament for the treatment of a disease or condition in a subject, which disease or condition is associated with the presence or aberrant expression of a target antigen, wherein the antigen-presenting cells or their precursors have not been subjected to activating conditions but have been contacted with an antigen that corresponds to the target antigen for a time and under conditions sufficient to express a processed or modified form of the antigen for presentation to the subject's immune system.

### BRIEF DESCRIPTION OF THE DRAWINGS

[0028] FIG. 1 is a schematic representation of an in vivo CTL killing assay performed at weeks 10, 15 and 20.

[0029] FIG. 2 is a graphical representation showing in vivo CTL killing of SIVgag overlapping peptide-pulsed cells. Two weeks after the FPV-boost (week 10), 3 equal PBMC populations were labelled with SNARF (2.5 μM) or CFSE (2.5 μM or 0.25 μM) and were pulsed with SIVpol, nef or gag overlapping peptide pools (OPAL), respectively. Blood sampled at 5 min, and at 4 and 16 h post-OPAL infusion was RBC-lysed and 10⁶ lymphocyte events were acquired by flow cytometry. At 5 min, all 3 populations of labelled PBMC are of relatively equal numbers. By 4 and 16 hours, 2×DNA/FPV-immunised monkey H20 displayed 27.3% and 76.0% clearance of SIVgag-pulsed PBMC with respect to SIVnef-pulsed PBMC, respectively, whereas no SIVgag-specific killing was observed in control-immunised monkey E20. Note that less events were collected at 4 h than 16 h.

[0030] FIG. 3 is a graphical representation showing vigorous killing of SIVgag- and SIVpol-pulsed PBMC following SHIV challenge. Two weeks after SHIV challenge (week 20), equal PBMC populations were labelled with SNARF (5 μM) or CFSE (6 μM or 2.5 μM) and were pulsed with SIVpol, no peptide, or SIVgag overlapping peptide pools (OPAL), respectively. 10⁶ RBC-lysed lymphocyte events were acquired by flow cytometry. 2×DNA/FPV-immunised monkeys H20 and H21, Displayed 92.3% and 98.3% killing of SIVgag-pulsed PBMC. These animals received 2 separate infusions of SIVpol- pulsed PBMC, furthermore displaying >99% SIVpol-specific killing. Previously CFSE-labelled PBMC were accounted for by flow cytometric analysis of 10⁶ lymphocytes immediately prior to OPAL-infusion (not shown).

[0031] FIG. 4 is a photographic representation showing a boost in T-cell immunogenicity 1 week following OPAL-infusion analysed by IFNγ ELISpot. A boost in SIVgag and pol peptide pool responses is evident in 2×DNA/FPV-immunised monkey H21, where as a primed response to SIVpol peptide pool is detected-in control-immunised monkey E20 (week 10 shown above).

[0032] FIG. 5 is a graphical representation depicting INFγ ELISpot analysis 1 week following OPAL infusion at week 10. A boost in T-cell immunogenicity to SIVgag, pol and nef overlapping peptide pools by OPAL infusion at week 10 was analysed 1 week later by ELISpot. Increased responses to SIVgag were detected in all four 2×DNA/FPV-immunised animals. Increased SIVpol responses were present in the 2×DNA/FPV-immunised monkeys, H20 and H21 (monkeys B00 and H8 did not receive any pol-pulsed PBMC), and in one control-immunised monkey, E20. No responses to SIVnef were primed in any animals. *IFNγ spots in monkeys E20 (prior to OPAL infusion) and B00 (post-OPAL infusion) were excluded due to ELISpot developmental problems.

[0033] FIG. 6 is a graphical representation showing INFγ ELISpot analysis I week following OPAL infusion at week 15. A boost in T-cell immunogenicity to SIVgag, pol, nef and HIV-1env overlapping peptide pools by OPAL infusion at week 15 was analysed 1 week later by INFγ ELISpot. Increased responses to SIVgag were detected in all four 2×DNA/FPV-immunised animals. SIVpol responses were marginally increased (or primed) in monkeys, E22, B00, H20 and H21. Increased responses to WI SIV were evident in all animals, whereas no responses were detected for SIVnef or HIV-env in any animals.

[0034] FIG. 7 is a graphical representation depicting mean INFγ ELISpot of immunogenicity of OPAL infusion. Mean INFγ ELISpot responses to (A) SIVgag and (B) SIVpol overlapping peptide pool of control- and 2×DNA/FPV-immunised animals receiving OPAL infusions (bold) were compared to animals receiving equivalent immunisations but no OPAL infusions, before an after the OPAL infusions given at weeks 10 and 15 following the immunisation. For the comparison of SIVpol-specific responses, 2×DNA/FPV-immunised animals were grouped based on receiving either 1 (B00 and H8) or 2 (H20 and H21) doses of pol-OPAL infusions.

[0035] FIG. 8 is a graphical representation showing the outcome of SHIV intrarectal challenge. At week 18 all control-and 2×DNA/FPV-immunised macaques were challenged intrarectally with SHIVₘₙ₂₂₉ and were assessed for plasma SHIV RNA viral load and CD4+ T cell count over the course of the infection. Recipients of OPAL infusion were compared to their respective immunised non-OPAL recipients. Group comparisons indicate mean±SE. 2×DNA/FPV-immunised macaques receiving OPAL infusions were further grouped based on receiving either 1 or 2 separate doses of pol-pulsed PBMC (B00 & H8, and H20 & H21, respectively).

[0036] FIG. 9 is a graphical representation depicting induction of CD4+ and CD8+ T cell responses to SHIV antigens in monkeys infected with SHIV utilising administration of whole blood pulsed with overlapping 15 mer peptides encompassing the open reading frames of the entire SHIV genome. The whole blood pulsed peptides were administered at weeks 0, 4 and 8 (arrows) and a boost in T cell immunogenicity of both CD4+ and CD8+ T cells measured by IFNgamma production to SHIV antigens gag, pol, env and rev-tat-vpu-nef detected by ICS is seen following each time point. *Pre-OPAL T cells responses measured 1 week prior to 1^{st} OPAL (week -1).

[0037] FIG. 10 is a graphical representation depicting de novo induction of CD4+ and CD8+ T cell responses to HCV in monkeys utilising administration of whole blood pulsed with overlapping 18 mer peptides encompassing the open reading frames of the entire HCV type-1a H77 genome. The whole blood pulsed peptides were administered at weeks 0, 4 and 8 (arrows) in two separate pools (peptides: 1-116, and; 117-441). Induction and boosting of T cell immunogenicity of both CD4+ and CD8+ T cells measured by IFNgamma production to HCV antigens detected by ICS is seen following each time point. *Pre-OPAL T cells responses measured 1 week prior to 1^{st} OPAL (week -1).

[0038] FIG. 11 is a graphical representation showing de novo induction of CD4+ and CD8+ T cell responses to peptides representative of drug-resistant mutations in HIV-1 described in HIV-1 infected humans, in monkeys utilising administration of whole blood pulsed with 17 mer peptides encompassing known sites of reverse transcriptase or protease resistance mutations. The whole blood pulsed peptides were administered at weeks 0, 4 and 8 (arrows). Induction and boosting of T cell immunogenicity of both CD4+ and CD8+ T cells measured by IFNgamma production to HIV-1 drug-resistant mutation peptides detected by ICS is seen following each time point. *Pre-OPAL T cells responses measured 1 week prior to 1^{st} OPAL (week -1).

[0039] FIG. 12 is a diagrammatic representation showing one embodiment of a pool of single peptides corresponding to drug-resistant mutations in the reverse transcriptase region or the protease region of wild-type HIV-1 described in HIV-1 humans (Mimotopes, Melbourne). 17 mer peptides were designed spanning the sites of common known mutations to incorporate the resistant mutation at the 9^{th} amino acid residue (bold) on each 17 mer peptide, such that every 9 mer epitope (the most common length of CD8+ T cell epitopes) as a result of proteolytic cleaving ex vivo would encompass the mutation.

### DETAILED DESCRIPTION OF TH INVENTION

### 1. Definitions

[0040] Unless defined otherwise, all technical and scientific terms used herein have the same meaning as commonly understood by those of ordinary skill in the art to which the invention belongs. Although any methods and materials similar or equivalent to those described herein can be used in the practice or testing of the present invention, preferred methods and materials are described. For the purposes of the present invention, the following terms are defined below.

[0041] The articles “a” and “an” are used herein to refer to one or to more than one (i.e., to at least one) of the grammatical object of the article. By way of example, “an element” means one element or more than one element.

[0042] The term “about” is used herein to refer to conditions (e.g., amounts, concentrations, time etc) that vary by as much as 30%, preferably by as much as 20%, and more preferably by as much as 10% to a specified condition.

[0043] The term “activating conditions” refers to treatment conditions that lead to the expression of each of CD2, CD83, CD14, MHC class I, MHC class II and TNF-α at a level or functional activity that results from an activating treatment condition selected from: incubating the antigen-presenting cells or their precursors in the presence of an agent selected from cytokines (e.g., IL-4, GM-CSF or a type I interferon), chemokines, mitogens, lipopolysaccharide, or agents that induce interferon synthesis in the antigen-presenting cells or their precursors; or exposing the antigen-presenting cells or their precursors to physical stress. However, it shall be understood that the term “activating conditions” excludes treatment conditions that result in negligible activation of the cells, e.g., when less than about 20%, 15%, 10%, 9%, 8%, 7%, 6%, 5%, 4%, 3%, 2%, 1%, 0.5%, 0.2% or 0.1% of the cells are activated, or when each of CD2, CD83, CD14, MHC class I, MHC class II and TNF-α is expressed at a level or functional activity that is at least about 30%, 40%, 50%, 60%, 70%, 80% or 90%, or even at least about 100%, 200%, 300%, 400%, 500%, 600%, 700%, 800%, 900% or 1000% higher, or at least about 30%, 40%, 50%, 60%, 70%, 80%, 90%, 92%, 94%, 96%, 97%, 98% or 99%, or even an at least about 99.5%, 99.9%, 99.95%, 99.99%, 99.995% or 99.999% lower than its level or functional activity in antigen-presenting cells or their precursors subjected to an activating treatment condition mentioned above.

[0044] By “antigen” is meant all, or part of, a protein, peptide, or other molecule or macromolecule capable of eliciting an immune response in a vertebrate animal, preferably a mammal. Such antigens are also reactive with antibodies from animals immunised with said protein, peptide, or other molecule or macromolecule.

[0045] By “antigen-binding molecule” is meant a molecule that has binding affinity for a target antigen. It will be understood that this term extends to immunoglobulins, immunoglobulin fragments and non-immunoglobulin derived protein frameworks that exhibit antigen-binding activity.

[0046] By “autologous” is meant something (e.g., cells, tissues etc) derived from the same organism.

[0047] The term “allogeneic” as used herein refers to cells, tissues, organisms etc that are of different genetic constitution.

[0048] Throughout this specification, unless the context requires otherwise, the words “comprise”, “comprises” and “comprising” will be understood to imply the inclusion of a stated step or element or group of steps or elements but not the exclusion of any other step or element or group of steps or elements.

[0049] By “corresponds to” or “corresponding to” is meant a polynucleotide (a) having a nucleotide sequence that is substantially identical or complementary to all or a portion of a reference polynucleotide sequence or (b) encoding an amino acid sequence identical to an amino acid sequence in a peptide or protein. This phrase also includes within its scope a peptide or polypeptide having an amino acid sequence that is substantially identical or similar to a sequence of amino acids in a reference peptide or protein.

[0050] As used herein, the terms “culturing”, “culture” and the like refer to the set of procedures used in vitro where a population of cells (or a single cell) is incubated under conditions which have been shown to support the growth or maintenance of the cells in vitro. The art recognises a wide number of formats, media, temperature ranges, gas concentrations etc. which need to be defined in a culture system. The parameters will vary based on the format selected and the specific needs of the individual who practices the methods herein disclosed. However, it is recognised that the determination of culture parameters is routine in nature.

[0051] By “effective amount”, in the context of modulating an immune response or treating or preventing a disease or condition, is meant the administration of that amount of composition to an individual in need thereof, either in a single dose or as part of a series, that is effective for that modulation, treatment or prevention. The effective amount will vary depending upon the health and physical condition of the individual to be treated, the taxonomic group of individual to be treated, the formulation of the composition, the assessment of the medical situation, and other relevant factors. It is expected that the amount will fall in a relatively broad range that can be determined through routine trials.

[0052] By “expression vector” is meant any autonomous genetic element capable of directing the synthesis of a protein encoded by the vector. Such expression vectors are known by practitioners in the art.

[0053] The term “gene” as used herein refers to any and all discrete coding regions of the cell's genome, as well as associated non-coding and regulatory regions. The gene is also intended to mean the open reading frame encoding specific polypeptides, introns, and adjacent 5′ and 3′ non-coding nucleotide sequences involved in the regulation of expression. In this regard, the gene may further comprise control signals such as promoters, enhancers, termination and/or polyadenylation signals that are naturally associated with a given gene, or heterologous control signals. The DNA sequences may be cDNA or genomic DNA or a fragment thereof. The gene may be introduced into an appropriate vector for extrachromosomal maintenance or for integration into the host.

[0054] A compound or composition is “immunogenic” if it is capable of either: a) generating an immune response against an antigen (e.g., a tumour antigen) in a naive individual; or b) reconstituting, boosting, or maintaining an immune response in an individual beyond what would occur if the compound or composition was not administered. A compound or composition is immunogenic if it is capable of attaining either of these criteria when administered in single or multiple doses.

[0055] Reference herein to “immuno-interactive” includes reference to any interaction, reaction, or other form of association between molecules and in particular where one of the molecules is, or mimics, a component of the immune system.

[0056] By “isolated” is meant material that is substantially or essentially free from components that normally accompany it in its native state.

[0057] By “modulating” is meant increasing or decreasing, either directly or indirectly, the immune response of an individual. In certain embodiments, “modulation” or “modulating” means that a desired/selected response is more efficient (e.g., at least 10%, 20%, 30%, 40%, 50%, 60% or more), more rapid (e.g., at least 10%, 20%, 30%, 40%, 50%, 60% or more), greater in magnitude (e.g., at least 10%, 20%, 30%, 40%, 50%, 60% or more), and/or more easily induced (e.g., at least 10%, 20%, 30%, 40%, 50%, 60% or more) than in the absence of an antigen or than if the antigen had been used alone.

[0058] The term “operably connected” or “operably linked” as used herein means placing a structural gene under the regulatory control of a promoter, which then controls the transcription and optionally translation of the gene. In the construction of heterologous promoter/structural gene combinations, it is generally preferred to position the genetic sequence or promoter at a distance from the gene transcription start site that is approximately the same as the distance between that genetic sequence or promoter and the gene it controls in its natural setting; i.e. the gene from which the genetic sequence or promoter is derived. As is known in the art, some variation in this distance can be accommodated without loss of function. Similarly, the preferred positioning of a regulatory sequence element with respect to a heterologous gene to be placed under its control is defined by the positioning of the element in its natural setting; i.e. the genes from which it is derived.

[0059] The terms “patient,” “subject” and “individual” are used interchangeably herein to refer to any subject, particularly a vertebrate subject, and even more particularly a mammalian subject, for whom therapy or prophylaxis is desired. However, it will be understood that these terms do not imply that symptoms are present. Suitable vertebrate animals that fall within the scope of the invention include, but are not restricted to, primates, livestock animals (e.g., sheep, cows, horses, donkeys, pigs), laboratory test animals (e.g., rabbits, mice, rats, guinea pigs, hamsters), companion animals (e.g., cats, dogs) and captive wild animals (e.g., foxes, deer, dingoes, reptiles, avians, fish).

[0060] By “pharmaceutically-acceptable carrier” is meant a solid or liquid filler, diluent or encapsulating substance that may be safely used in topical or systemic administration.

[0061] The term “polynucleotide” or “nucleic acid” as used herein designates mRNA, RNA, cRNA, cDNA or DNA. The term typically refers to oligonucleotides greater than 30 nucleotides in length.

[0062] “Polypeptide”, “peptide” and “protein” are used interchangeably herein to refer to a polymer of amino acid residues and to variants and synthetic analogues of the same. Thus, these terms apply to amino acid polymers in which one or more amino acid residues is a synthetic non-naturally occurring amino acid, such as a chemical analogue of a corresponding naturally occurring amino acid, as well as to naturally-occurring amino acid polymers.

[0063] Reference herein to a “promoter” is to be taken in its broadest context and includes the transcriptional regulatory sequences of a classical genomic gene, including the TATA box which is required for accurate transcription initiation, with or without a CCAAT box sequence and additional regulatory elements (i.e. upstream activating sequences, enhancers and silencers) which alter gene expression in response to developmental and/or environmental stimuli, or in a tissue-specific or cell-type-specific manner. A promoter is usually, but not necessarily, positioned upstream or 5′, of a structural gene, the expression of which it regulates. Furthermore, the regulatory elements comprising a promoter are usually positioned within 2 kb of the start site of transcription of the gene. Preferred promoters according to the invention may contain additional copies of one or more specific regulatory elements to further enhance expression in a cell, and/or to alter the timing of expression of a structural gene to which it is operably connected.

[0064] The term “purified peptide” means that the peptide is substantially free of cellular material or other contaminating proteins from the cell or tissue source from which the peptide is derived, or substantially free from chemical precursors or other chemicals when chemically synthesised. “Substantially free” means that a preparation of a peptide of the invention is at least 10% pure. In certain embodiments, the preparation of peptide has less than about 30%, 25%, 20%, 15%, 10% and desirably 5% (by dry weight), of non-peptide protein (also referred to herein as a “contaminating protein”), or of chemical precursors or non-peptide chemicals. The invention includes isolated or purified preparations of at least 0.01, 0.1, 1.0, and 10 milligrams in dry weight.

[0065] The term “recombinant polynucleotide” as used herein refers to a polynucleotide formed in vitro by the manipulation of nucleic acid into a form not normally found in nature. For example, the recombinant polynucleotide may be in the form of an expression vector. Generally, such expression vectors include transcriptional and translational regulatory nucleic acid operably linked to the nucleotide sequence.

[0066] By “recombinant polypeptide” is meant a polypeptide made using recombinant techniques, i.e., through the expression of a recombinant polynucleotide.

[0067] By “reporter molecule” as used in the present specification is meant a molecule that, by its chemical nature, provides an analytically identifiable signal that allows the detection of a complex comprising an antigen-binding molecule and its target antigen. The term “reporter molecule” also extends to use of cell agglutination or inhibition of agglutination such as red blood cells on latex beads, and the like.

[0068] The term “sequence identity” as used herein refers to the extent that sequences are identical on a nucleotide-by-nucleotide basis or an amino acid-by-amino acid basis over a window of comparison. Thus, a “percentage of sequence identity” is calculated by comparing two optimally aligned sequences over the window of comparison, determining the number of positions at which the identical nucleic acid base (e.g., A, T, C, G, I) or the identical amino acid residue (e.g., Ala, Pro, Ser, Thr, Gly, Val, Leu, Ile, Phe, Tyr, Trp, Lys, Arg, His, Asp, Glu, Asn, Gln, Cys and Met) occurs in both sequences to yield the number of matched positions, dividing the number of matched positions by the total number of positions in the window of comparison (i.e., the window size), and multiplying the result by 100 to yield the percentage of sequence identity. For the purposes of the present invention, “sequence identity” will be understood to mean the “match percentage” calculated by the DNASIS computer program (Version 2.5 for windows; available from Hitachi Software engineering Co., Ltd., South San Francisco, Calif., USA) using standard defaults as used in the reference manual accompanying the software.

[0069] “Similarity” refers to the percentage number of amino acids that are identical or constitute conservative substitutions as defined in Table B infra. Similarity may be determined using sequence comparison programs such as GAP (Deveraux et al. 1984, Nucleic Acids Research 12, 387-395). In this way, sequences of a similar or substantially different length to those cited herein might be compared by insertion of gaps into the alignment, such gaps being determined, for example, by the comparison algorithm used by GAP.

[0070] Terms used to describe sequence relationships between two or more polynucleotides or polypeptides include “reference sequence”, “comparison window”, “sequence identity”, “percentage of sequence identity” and “substantial identity”. A “reference sequence” is at least 12 but frequently to 18 and often at least 25 monomer units, inclusive of nucleotides and amino acid residues, in length. Because two polynucleotides may each comprise (1) a sequence (i.e., only a portion of the complete polynucleotide sequence) that is similar between the two polynucleotides, and (2) a sequence that is divergent between the two polynucleotides, sequence comparisons between two (or more) polynucleotides are typically performed by comparing sequences of the two polynucleotides over a “comparison window” to identify and compare local regions of sequence similarity. A “comparison window” refers to a conceptual segment of at least 6 contiguous positions, usually about 50 to about 100, more usually about 100 to about 150 in which a sequence is compared to a reference sequence of the same number of contiguous positions after the two sequences are optimally aligned. The comparison window may comprise additions or deletions (i.e., gaps) of about 20% or less as compared to the reference sequence (which does not comprise additions or deletions) for optimal alignment of the two sequences. Optimal alignment of sequences for aligning a comparison window may be conducted by computerised implementations of algorithms (GAP, BESTFIT, FASTA, and TFASTA in the Wisconsin Genetics Software Package Release 7.0, Genetics Computer Group, 575 Science Drive Madison, Wis., USA) or by inspection and the best alignment (i.e., resulting in the highest percentage homology over the comparison window) generated by any of the various methods selected. Reference also may be made to the BLAST family of programs as for example disclosed by Altschul et al., 1997, Nucl. Acids Res. 25:3389. A detailed discussion of sequence analysis can be found in Unit 19.3 of Ausubel et al., “Current Protocols in Molecular Biology”, John Wiley & Sons Inc, 1994-1998, Chapter 15.

[0071] By “substantially purified population” and the like is meant that greater than about 80%, usually greater than about 90%, more usually greater than about 95%, typically greater than about 98%, and more typically greater than about 99% of the cells in the population are antigen-presenting cells of a chosen type.

[0072] The term “uncultured” as used herein refers to a population of cells (or a single cell), which have been removed from an animal and incubated or processed under conditions that do not result in the growth or expansion of the cells in vitro, or that result in negligible growth or expansion of the cells (e.g., an increase of less than about 50%, 40%, 30%, 20%, 15%, 10%, 9%, 8%, 7%, 6%, 5%, 4%, 3%, 2%, 1%, 0.5%, 0.2% or 0.1% in cell number as compared to the number of cells at the commencement of the incubation or processing). In certain desirable embodiments, the population of cells (or the single cell) is incubated or processed under conditions supporting the maintenance of the cells in vitro.

[0073] By “vector” is meant a nucleic acid molecule, preferably a DNA molecule derived, for example, from a plasmid, bacteriophage, or plant virus, into which a nucleic acid sequence may be inserted or cloned. A vector preferably contains one or more unique restriction sites and may be capable of autonomous replication in a defined host cell including a target cell or tissue or a progenitor cell or tissue thereof, or be integrable with the genome of the defined host such that the cloned sequence is reproducible. Accordingly, the vector may be an autonomously replicating vector, i.e., a vector that exists as an extrachromosomal entity, the replication of which is independent of chromosomal replication, e.g., a linear or closed circular plasmid, an extrachromosomal element, a minichromosome, or an artificial chromosome. The vector may contain any means for assuring self-replication. Alternatively, the vector may be one which, when introduced into the host cell, is integrated into the genome and replicated together with the chromosome(s) into which it has been integrated. A vector system may comprise a single vector or plasmid, two or more vectors or plasmids, which together contain the total DNA to be introduced into the genome of the host cell, or a transposon. The choice of the vector will typically depend on the compatibility of the vector with the host cell into which the vector is to be introduced. The vector may also include a selection marker such as an antibiotic resistance gene that can be used for selection of suitable transformants.

### 2. Immunomodulating Sets of Overlapping Peptides

[0074] The present invention is predicated in part on the discovery that antigen-presenting cells contacted ex vivo with a set of overlapping peptides spanning a viral polypeptide antigen of interest (also referred to herein as Overlapping Peptide-pulsed Autologous ceLls, OPAL) are effective in producing a strong immunogenic response in an outbred population, without prior knowledge of the epitopes of the antigen. Since antigen-presenting cells form a significant part of the circulatory system, it is proposed that systemic delivery of the overlapping peptides per se will produce a similar protective effect. Accordingly, the present invention broadly provides a set of peptides for modulating an immune response to a polypeptide of interest, wherein individual peptides comprise different portions of an amino acid sequence corresponding to the polypeptide of interest and display partial sequence identity or similarity to at least one other peptide of the set.

[0075] The partial sequence identity or similarity is typically contained at one or both ends of an individual peptide. In one embodiment, there are at least 4, 5, 6, 7, 8, 9, 10, 11, 12, 13, 14, 15, 20, 25, 30, 40, 50 contiguous amino acid residues at one or both ends of an individual peptide, whose sequence is identical or similar to an amino acid sequence contained within at least one other of the peptides. In an alternate embodiment, there are less than 500, 100, 50, 40, 30 contiguous amino acid residues at one or both ends of an individual peptide, whose sequence is identical or similar to an amino acid sequence contained within at least one other of the peptides. Such ‘sequence overlap’ is advantageous to prevent or otherwise reduce the loss of any potential epitopes contained within a polypeptide of interest. In specific examples disclosed herein, the sequence overlap is 11 amino acid residues.

[0076] Typically, when peptides have partial sequence similarity, their sequences will usually differ by one or more conserved and/or non-conserved amino acid substitutions. Exemplary conservative substitutions are listed in the following table.

TABLE A

| | Exemplary | | Exemplary |
|---|---|---|---|
| Original Residue | Substitutions | Original Residue | Substitutions |
| Ala | Ser | Leu | Ile,Val |
| Arg | Lys | Lys | Arg, Gln, Glu |
| Asn | Gln, His | Met | Leu, Ile, |
| Asp | Glu | Phe | Met, Leu, Tyr |
| Cys | Ser | Ser | Thr |
| Gln | Asn | Thr | Ser |
| Glu | Asp | Trp | Tyr |
| Gly | Pro | Tyr | Trp, Phe |
| His | Asn, Gln | Val | Ile, Leu |
| Ile | Leu, Val | | |

[0077] Conserved or non-conserved substitutions may correspond to polymorphisms in a polypeptide of interest. Polymorphic polypeptides are expressed by various pathogenic organisms and cancers. For example, the polymorphic polypeptides may be expressed by different viral strains or clades or by different cancers in distinct individuals. Thus, where polymorphic regions of a pathogen of interest are involved, it is generally desirable to use additional sets of peptides covering the variation in amino acid residue at the polymorphic site.

[0078] The peptides of the invention may be of any suitable size that can be utilised to elicit an immune response to a polypeptide of interest. A number of factors can influence the choice of peptide size. For example, the size of a peptide can be chosen such that it includes, or corresponds to the size of, CD4+ T cell epitopes, CD8+ T cell epitopes and/or B cell epitopes, and their processing requirements. Practitioners in the art will recognise that class I-restricted CD8+ T cell epitopes are typically between 8 and 10 amino acid residues in length and if placed next to unnatural flanking residues, such epitopes can generally require 2 to 3 natural flanking amino acid residues to ensure that they are efficiently processed and presented. Class II-restricted CD4+ T cell epitopes usually range between 12 and 25 amino acid residues in length and may not require natural flanking residues for efficient proteolytic processing although it is believed that natural flanking residues may play a role.

[0079] Another important feature of class II-restricted epitopes is that they generally contain a core of 9-10 amino acid residues in the middle which bind specifically to class II MHC molecules with flanking sequences either side of this core stabilising binding by associating with conserved structures on either side of class II MHC antigens in a sequence independent manner. Thus the functional region of class II-restricted epitopes is typically less than about 15 amino acid residues long. The size of linear B cell epitopes and the factors effecting their processing, like class II-restricted epitopes, are quite variable although such epitopes are frequently smaller in size than 15 amino acid residues. From the foregoing, it is advantageous, but not essential, that the size of the peptide is at least 6, 7, 8, 9, 10, 11, 12, 13, 14, 15, 20, 25, 30 amino acid residues. Suitably, the size of the peptide is no more than about 500, 200, 100, 80, 60, 50, 40 amino acid residues. In one embodiment, the size of the peptide is large enough to minimise loss of T cell and/or B cell epitopes. In another embodiment, the size of the peptide is sufficient for presentation by an antigen-presenting cell of a T cell and/or a B cell epitope contained within the peptide. In one example of this embodiment, the size of the peptide is about 15 amino acid residues.

[0080] The polypeptide of interest is suitably a disease- or condition-associated antigen, which may be selected from endogenous antigens produced by an individual or exogenous antigens that are foreign to the individual. Suitable endogenous antigens include, but are not restricted to, self-antigens that are targets of autoimmune responses as well as cancer or tumour antigens. Illustrative examples of self antigens useful in the treatment or prevention of autoimmune disorders include, but not limited to, diabetes mellitus, arthritis (including rheumatoid arthritis, juvenile rheumatoid arthritis, ostecarthritis, psoriasic arthritis), multiple sclerosis, myasthenia gravis, systemic lupus erythematosis, autoimmune thyroiditis, dermatitis (including atopic dermatitis and eczematous dermatitis), psoriasis, Sjögren's Syndrome, including keratoconjunctivitis sicca secondary to Sjögren's Syndrome, alopecia areata, allergic responses due to arthropod bite reactions, Crohn's disease, ulcer, iritis, conjunctivitis, keratoconjunctivitis, ulcerative colitis, asthma, allergic asthma, cutaneous lupus erythematosus, scleroderma, vaginitis, proctitis, drug eruptions, leprosy reversal reactions, erythema nodosum leprosum, autoimmune uveitis, allergic encephalomyelitis, acute necrotizing haemorrhagic encephalopathy, idiopathic bilateral progressive sensorineural hearing loss, aplastic anaemia, pure red cell anaemia, idiopathic thrombocytopenia, polychondritis, Wegener's granulomatosis, chronic active hepatitis, Stevens-Johnson syndrome, idiopathic sprue, lichen planus, Graves ophthalmopathy, sarcoidosis, primary biliary cirrhosis, uveitis posterior, and interstitial lung fibrosis. Other autoantigens include those derived from nucleosomes for the treatment of systemic lupus erythematosus (e.g., GenBank Accession No. D28394; Bruggen et al., 1996, Ann. Med. Interne (Paris), 147:485-489) and from the 44,000 Da peptide component of ocular tissue cross-reactive with 0. volvulus antigen (McKeclmie et al., 1993, Ann Trop. Med. Parasitol. 87:649-652). Thus, illustrative autoantigens antigens that can be used in the compositions and methods of the present invention include, but are not limited to, at least a portion of a lupus autoantigen, Smith, Ro, La, U1-RNP, fibrillin (scleroderma), pancreatic β cell antigens, GAD65 (diabetes related), insulin, myelin basic protein, myelin proteolipid protein, histones, PLP, collagen, glucose-6-phosphate isomerase, citrullinated proteins and peptides, thyroid antigens, thyroglobulin, thyroid-stimulating hormone (TSH) receptor, various tRNA synthetases, components of the acetyl choline receptor (AchR), MOG, proteinase-3, myeloperoxidase, epidermal cadherin, acetyl choline receptor, platelet antigens, nucleic acids, nucleic acid:protein complexes, joint antigens, antigens of the nervous system, salivary gland proteins, skin antigens, kidney antigens, heart antigens, lung antigens, eye antigens, erythrocyte antigens, liver antigens and stomach antigens.

[0081] Non-limiting examples of cancer or tumour antigens include antigens from a cancer or tumour selected from ABL1 protooncogene, AIDS Related Cancers, Acoustic Neuroma, Acute Lymphocytic Leukaemia, Acute Myeloid Leukaemia, Adenocystic carcinoma, Adrenocortical Cancer, Agnogenic myeloid metaplasia, Alopecia, Alveolar soft-part sarcoma, Anal cancer, Angiosarcoma, Aplastic Anaemia, Astrocytoma, Ataxia-telangiectasia, Basal Cell Carcinoma (Skin), Bladder Cancer, Bone Cancers, Bowel cancer, Brain Stem Glioma, Brain and CNS Tumours, Breast Cancer, CNS tumours, Carcinoid Tumours, Cervical Cancer, Childhood Brain Tumours, Childhood Cancer, Childhood Leukaemia, Childhood Soft Tissue Sarcoma, Chondrosarcoma, Choriocarcinoma, Chronic Lymphocytic Leukaemia, Chronic Myeloid Leukaemia, Colorectal Cancers, Cutaneous T-Cell Lymphoma, Dermatofibrosarcoma-protuberans, Desmoplastic-Small-Round-Cell-Tumour, Ductal Carcinoma, Endocrine Cancers, Endometrial Cancer, Ependymoma, Esophageal Cancer, Ewing's Sarcoma, Extra-Hepatic Bile Duct Cancer, Eye Cancer, Eye: Melanoma, Retinoblastoma, Fallopian Tube cancer, Fanconi Anaemia, Fibrosarcoma, Gall Bladder Cancer, Gastric Cancer, Gastrointestinal Cancers, Gastrointestinal-Carcinoid-Tumour, Genitourinary Cancers, Germ Cell Tumours, Gestational-Trophoblastic-Disease, Glioma, Gynaecological Cancers, Haematological Malignancies, Hairy Cell Leukaemia, Head and Neck Cancer, Hepatocellular Cancer, Hereditary Breast Cancer, Histiocytosis, Hodgkin's Disease, Human Papillomavirus, Hydatidiform mole, Hypercalcemia, Hypopharynx Cancer, IntraOcular Melanoma, Islet cell cancer, Kaposi's sarcoma, Kidney Cancer, Langerhan's-Cell-Histiocytosis, Laryngeal Cancer, Leiomyosarcoma, Leukaemia, Li-Fraumeni Syndrome, Lip Cancer, Liposarcoma, Liver Cancer, Lung Cancer, Lymphedema, Lymphoma, Hodgkin's Lymphoma, Non-Hodgkin's Lymphoma, Male Breast Cancer, Malignant-Rhabdoid-Tumour-of-Kidney, Medulloblastoma, Melanoma, Merkel Cell Cancer, Mesothelioma, Metastatic Cancer, Mouth Cancer, Multiple Endocrine Neoplasia, Mycosis Fungoides, Myelodysplastic Syndromes, Myeloma, Myeloproliferative Disorders, Nasal Cancer, Nasopharyngeal Cancer, Nephroblastoma, Neuroblastoma, Neurofibromatosis, Nijmegen Breakage Syndrome, Non-Melanoma Skin Cancer, Non-Small-Cell-Lung-Cancer-(NSCLC), Ocular Cancers, Oesophageal Cancer, Oral cavity Cancer, Oropharynx Cancer, Osteosarcoma, Ostomy Ovarian Cancer, Pancreas Cancer, Paranasal Cancer, Parathyroid Cancer, Parotid Gland Cancer, Penile Cancer, Peripheral-Neuroectodermal-Tumours, Pituitary Cancer, Polycythemia vera, Prostate Cancer, Rare-cancers-and-associated-disorders, Renal Cell Carcinoma, Retinoblastoma, Rhabdomyosarcoma, Rothmund-Thomson Syndrome, Salivary Gland Cancer, Sarcoma, Schwannoma, Sezary syndrome, Skin Cancer, Small Cell Lung Cancer (SCLC), Small Intestine Cancer, Soft Tissue Sarcoma, Spinal Cord Tumours, Squamous-Cell-Carcinoma-(skin), Stomach Cancer, Synovial sarcoma, Testicular Cancer, Thymus Cancer, Thyroid Cancer, Transitional-Cell-Cancer-(bladder), Transitional-Cell-Cancer-(renal-pelvis-/-ureter), Trophoblastic Cancer, Urethral Cancer, Urinary System Cancer, Uroplakins, Uterine sarcoma, Uterus Cancer, Vaginal Cancer, Vulva Cancer, Waldenstrom's-Macroglobulinemia, Wilms' Tumour. In certain embodiments, the cancer or tumour relates to melanoma. Illustrative examples of melanoma-related antigens include melanocyte differentiation antigen (e.g., gp100, MART, TRP-1, Tyros, TRP2, MC1R, MUC1F, MUC1R or a combination thereof) and melanoma-specific antigens (e.g., BAGE, GAGE-1, gp100In4, MAGE-1 (e.g., GenBank Accession No. X54156 and AA494311), MAGE-3, MAGE4, PRAME, TRP2IN2, NYNSO1a, NYNSO1b, LAGE1, p97 melanoma antigen (e.g., GenBank Accession No. M12154) or a combination thereof). Other tumour-specific antigens include the Ras peptide and p53 peptide associated with advanced cancers, MUC1-KLH antigen associated with breast carcinoma (e.g., GenBank Accession No. J03651), CEA (carcinoembryonic antigen) associated with colorectal cancer (e.g., GenBank Accession No. X98311), gp100 (e.g., GenBank Accession No. S73003) and the PSA antigen with prostate cancer (e.g., GenBank Accession No. X14810). The p53 gene sequence is known (See e.g., Harris et al., 1986 Mol. Cell. Biol. 6:4650-4656) and is deposited with GenBank under Accession No. M14694.

[0082] Foreign antigens are suitably selected from transplantation antigens, allergens as well as antigens from pathogenic organisms. Transplantation antigens can be derived from donor cells or tissues from e.g., heart, lung, liver, pancreas, kidney, neural graft components, or from the donor antigen-presenting cells bearing MHC loaded with self antigen in the absence of exogenous antigen.

[0083] Non-limiting examples of allergens include Fel d 1 (i.e., the feline skin and salivary gland allergen of the domestic cat Felis domesticus, the amino acid sequence of which is disclosed International Publication WO 91/06571), Der p I, Der p II, Der fI or Der fII (i.e., the major protein allergens from the house dust mite dermatophagoides, the amino acid sequence of which is disclosed in International Publication WO 94/24281). Other allergens may be derived, for example from the following: grass, tree and weed (including ragweed) pollens; fungi and moulds; foods such as fish, shellfish, crab, lobster, peanuts, nuts, wheat gluten, eggs and milk; stinging insects such as bee, wasp, and hornet and the chirnomidae (non-biting midges); other insects such as the housefly, fruitfly, sheep blow fly, screw worm fly, grain weevil, silkworm, honeybee, non-biting midge larvae, bee moth larvae, mealworm, cockroach and larvae of Tenibrio molitor beetle; spiders and mites, including the house dust mite; allergens found in the dander, urine, saliva, blood or other bodily fluid of mammals such as cat, dog, cow, pig, sheep, horse, rabbit, rat, guinea pig, mouse and gerbil; airborne particulates in general; latex; and protein detergent additives.

[0084] Exemplary pathogenic organisms include, but are not limited to, viruses, bacteria, fungi parasites, algae and protozoa and amoebeae. Illustrative examples of viruses include viruses responsible for diseases including, but not limited to, measles, mumps, rubella, poliomyelitis, hepatitis A, B (e.g., GenBank Accession No. E02707), and C (e.g., GenBank Accession No. E06890), as well as other hepatitis viruses, influenza, adenovirus (e.g., types 4 and 7), rabies (e.g., GenBank Accession No. M34678), yellow fever, Epstein-Barr virus and other herpesviruses such as papillomavirus, Ebola virus, influenza virus, Japanese encephalitis (e.g., GenBank Accession No. E07883), dengue (e.g., GenBank Accession No. M24444), hantavirus, sendai virus, respiratory syncytial virus, othromyxoviruses, vesicular stomatitis virus, visna virus, cytomegalovirus and human immunodeficiency virus (HIV) (e.g., GenBank Accession No. U18552). Any suitable antigen derived from such viruses are useful in the practice of the present invention. For example, illustrative retroviral antigens derived from HIV include, but are not limited to, antigens such as gene products of the gag, pol, and env genes, the Nef protein, reverse transcriptase, and other HIV components. Illustrative examples of hepatitis viral antigens include, but are not limited to, antigens such as the S, M, and L proteins of hepatitis B virus, the pre-S antigen of hepatitis B virus, and other hepatitis, e.g., hepatitis A, B, and C, viral components such as hepatitis C viral RNA. Illustrative examples of influenza viral antigens include; but are not limited to, antigens such as hemagglutinin and neurarninidase and other influenza viral components. Illustrative examples of measles viral antigens include, but are not limited to, antigens such as the measles virus fusion protein and other measles virus components. Illustrative examples of rubella viral antigens include, but are not limited to, antigens such as proteins E1 and E2 and other rubella virus components; rotaviral antigens such as VP7sc and other rotaviral components. Illustrative examples of cytomegaloviral antigens include, but are not limited to, antigens such as envelope glycoprotein B and other cytomegaloviral antigen components. Non-limiting examples of respiratory syncytial viral antigens include antigens such as the RSV fusion protein, the M2 protein and other respiratory syncytial viral antigen components. Illustrative examples of herpes simplex viral. antigens include, but are not limited to, antigens such as immediate early proteins, glycoprotein D, and other herpes simplex viral antigen components. Non-limiting examples of varicella zoster viral antigens include antigens such as 9PI, gpII, and other varicella zoster viral antigen components. Non-limiting examples of Japanese encephalitis viral antigens include antigens such as proteins E, M-E, M-E-NS 1, NS 1, NS 1-NS2A, 80%E, and other Japanese encephalitis viral antigen components. Illustrative examples of rabies viral antigens include, but are not limited to, antigens such as rabies glycoprotein, rabies nucleoprotein and other rabies viral antigen components. Illustrative examples of papillomavirus antigens include, but are not limited to, the LI and L2 capsid proteins as well as the E6/ E7 antigens associated with cervical cancers, See Fundamental Virology, Second Edition, eds. Fields, B. N. and Knipe, D. M., 1991, Raven Press, New York, for additional examples of viral antigens.

[0085] Illustrative examples of fungi include Acremonium spp., Aspergillus spp., Basidiobolus spp., Bipolaris spp., Blastomyces dermatidis, Candida spp., Cladophialophora carrionii, Coccoidiodes immitis, Conidiobolus spp., Cryptococcus spp., Curvularia spp., Epidermophyton spp., Exophiala jeanselmei, Exserohilum spp., Fonsecaea compacta, Fonsecaea pedrosoi, Fusarium oxysporum, Fusarium solani, Geotrichum candidum, Histoplasma capsulatum var. capsulatum, Histoplasma capsulatum var. duboisii, Hortaea werneckii, Lacazia loboi, Lasiodiplodia theobromae, Leptosphaeria senegalensis, Madurella grisea, Madurella mycetomatis, Malassezia furfur, Microsporum spp., Neotestudina rosatii, Onychocola canadensis, Paracoccidioides brasiliensis, Phlialophora verrucosa, Piedraia hortae, Piedra iahortae, Pityriasis versicolor, Pseudallesheria boydii, Pyrenochaeta romeroi, Rhizopus arrhizus, Scopulariopsis brevicaulis, Scytalidium dimidiatum, Sporothrix schenckii, Trichophyton spp., Trichosporon spp., Zygomcete fungi, Absidia corymbifera, Rhizomucor pusillus and Rhizopus arrhizus. Thus, illustrative fungal antigens that can be used in the compositions and methods of the present invention include, but are not limited to, candida fungal antigen components; histoplasma fungal antigens such as heat shock protein 60 (HSP60) and other histoplasma fungal antigen components; cryptococcal fungal antigens such as capsular polysaccharides and other cryptococcal fungal antigen components; coccidiodes fungal antigens such as spherule antigens and other coccidiodes fungal antigen components; and tinea fungal antigens such as trichophytin and other coccidiodes fungal antigen components.

[0086] Illustrative examples of bacteria include bacteria that are responsible for diseases including, but not restricted to, diphtheria (e.g., Corynebacterium diphtheria), pertussis (e.g., Bordetella pertussis, GenBank Accession No. M35274), tetanus (e.g., Clostridium tetani, GenBank Accession No. M64353), tuberculosis (e.g., Mycobacterium tuberculosis), bacterial pneumonias (e.g., Haemophilus influenzae.), cholera (e.g., Vibrio cholerae), anthrax (e.g., Bacillus anthiracis), typhoid, plague, shigellosis (e.g., Shigella dysenteriae), botulism (e.g., Clostridium botulinum), salmonellosis (e.g., GenBank Accession No. L03833), peptic ulcers (e.g., Helicobacter pylori), Legionnaire's Disease, Lyme disease (e.g., GenBank Accession No. U59487), Other pathogenic bacteria include Escherichia coli, Clostridium perfringens, Pseudomonas aeruginosa, Staphylococcus aureus and Streptococcus pyogenes. Thus, bacterial antigens which can be used in the compositions and methods of the invention include, but are not limited to: pertussis bacterial antigens such as pertussis toxin, filamentous hemagglutinin, pertactin, F M2, FIM3, adenylate cyclase and other pertussis bacterial antigen components; diphtheria bacterial antigens such as diphtheria toxin or toxoid and other diphtheria bacterial antigen components; tetanus bacterial antigens such as tetanus toxin or toxoid and other tetanus bacterial antigen components, streptococcal bacterial antigens such as M proteins and other streptococcal bacterial antigen components; gram-negative bacilli bacterial antigens such as lipopolysaccharides and other gram-negative bacterial antigen components; Mycobacterium tuberculosis bacterial antigens such as mycolic acid, heat shock protein 65 (HSP65), the 30 kDa major secreted protein, antigen 85A and other mycobacterial antigen components; Helicobacter pylori bacterial antigen components, pneumococcal bacterial antigens such as pneumolysin, pneumococcal capsular polysaccharides and other pnermiococcal bacterial antigen components; Haemophilus influenza bacterial antigens such as capsular polysaccharides and other Haemophilus influenza bacterial antigen components; anthrax bacterial antigens such as anthrax protective antigen and other anthrax bacterial antigen components; rickettsiae bacterial antigens such as rompA and other rickettsiae bacterial antigen component. Also included with the bacterial antigens described herein are any other bacterial, mycobacterial, mycoplasmal, rickettsial, or chlamydial antigens.

[0087] Illustrative examples of protozoa include protozoa that are responsible for diseases including, but not limited to, malaria (e.g., GenBank Accession No. X53832), hookworm, onchocerciasis (e.g., GenBank Accession No. M27807), schistosomiasis (e.g., GenBank Accession No. LOS 198), toxoplasmosis, trypanosomiasis, leishmaniasis, giardiasis (GenBank Accession No. M33641), amoebiasis, filariasis (e.g., GenBank Accession No. J03266), borreliosis, and trichinosis. Thus, protozoal antigens which can be used in the compositions and methods of the invention include, but are not limited to: plasmodium falciparum antigens such as merozoite surface antigens, sporozoite surface antigens, circumsporozoite antigens, gametocyte/gamete surface antigens, blood-stage antigen pf 155/RESA and other plasmodial antigen components; toxoplasma antigens such as SAG-1, p30 and other toxoplasmal antigen components; schistosomae antigens such as glutathione-S-transferase, paramyosin, and other schistosomal antigen components; leishmania major and other leishmaniae antigens such as gp63, lipophosphoglycan and its associated protein and other leishmanial antigen components; and trypanosoma cruzi antigens such as the 75-77 kDa antigen, the 56 kDa antigen and other trypanosomal antigen components.

[0088] The present invention also contemplates toxin components as antigens. Illustrative examples of toxins include, but are not restricted to, staphylococcal enterotoxins, toxic shock syndrome toxin; retroviral antigens (e.g., antigens derived from HIV), streptococcal antigens, staphylococcal enterotoxin-A (SEA), staphylococcal enterotoxin-B (SEB), staphylococcal enterotoxin₁₋₃ (SE₁₋₃), staphylococcal enterotoxin-D (SED), staphylococcal enterotoxin-E (SEE) as well as toxins derived from mycoplasma, mycobacterium, and herpes viruses.

[0089] In one example of the present invention, the size of individual peptides is about 14 or 15 amino acid residues and the sequence overlap at one or both ends of an individual peptide is about 11 amino acid residues. However, it will be understood that other suitable peptide sizes and sequence overlap sizes are contemplated by the present invention, which can be readily ascertained by persons of skill in the art.

[0090] It is advantageous but not necessary to utilise the entire sequence of a polypeptide of interest for producing a set of overlapping peptides. Typically, at least 30%, 40%, 50%, 60%, 70%, 80% 90%, 91%, 92%, 93%, 94%, 95%, 96%, 97%, 98%, 99% of the sequence corresponding to a polypeptide of interest is used to produce the overlapping peptides of the invention. However, it will be understood that the more sequence information from a polypeptide of interest that is utilised to produce the overlapping peptides, the greater the outbred population coverage will be of the overlapping peptides as an immunogen. Suitably, no sequence information from the polypeptide of interest is excluded (e.g., because of an apparent lack of immunological epitopes, since more rare or subdominant epitopes may be inadvertently missed). If required, hypervariable sequences within a polypeptide of interest can be either excluded from the construction of an overlapping set of peptides, or additional sets of peptides covering the polymorphic regions can be constructed and administered, Peptide sequences may include additional sequences that are not derived from a polypeptide of interest. These additional sequences may have various functions, including improving solubility, stability or immunogenicity or facilitating purification. Typically, such additional sequences are contained at one or both ends of a respective peptide.

[0091] Persons of skill in the art will appreciate that when preparing a set of overlapping peptides according to the invention, it may be advantageous to use sequence information from a plurality of different polypeptides produced by a pathogenic organism or expressed in a cancer. Accordingly, in certain embodiments, at least 2, 3, 4, 5, 6, 7, 9, 10, 15, 20 other sets of peptides are used for the production of the immunomodulating compositions of the invention, wherein the sequences of a respective other set of peptides are derived from a distinct polypeptide of interest and wherein individual peptides of the respective other set display partial sequence identity or similarity to at least one other peptide of a corresponding set of peptides. It is advantageous in this respect to utilise as many polypeptides as possible from, or in relation to, a particular source in the construction of sets of overlapping peptides. Suitably, at least about 30%, 40%, 50%, 60%, 70%, 80% 90%, 91%, 92%, 93%, 94%, 95%, 96%, 97%, 98%, 99%, and desirably 100%, of the polypeptides expressed by the source is used in the construction of the corresponding sets of overlapping peptides. Exemplary viral polypeptides that can be used for such construction include, but are not restricted to, latent polypeptides, regulatory polypeptides or polypeptides expressed early during their replication cycle. Suitably, polypeptides from a protozoan, bacterium, mycoplasma, fungus or helminth include, but are not restricted to, secretory polypeptides, regulatory polypeptides and polypeptides expressed on the surface of these organisms. Polypeptides from a cancer or tumour, which can be used for the construction of overlapping peptide sets, are suitably cancer-specific polypeptides.

[0092] Representative overlapping peptide sets for modulating the immune response to simian immunodeficiency virus (SIV) and/or the chimeric SIV-HIV-1 (SHIV), both of which are known to be suitable models for the pathogenic HIV-1 virus in humans, can be based on one or more polypeptides selected from SIV gag, pol, nef or SHIV env as for example presented in Tables 1 to 4. Illustrative overlapping peptide sets for modulating the immune response to HIV-1 can be based on one or more polypeptides selected from HIV Gag, Nef, Pol, Rev, Tat, Vif, Vpr and Vpu as for example set forth in Tables 5 to 12. An illustrative overlapping peptide set for modulating the immune response to HCV 1a can be based on the HCV 1a H77 polyprotein sequence as for example set forth in Table 13. An illustrative overlapping peptide set for modulating the immune response to HBV Genotype A can be based on all proteins expressed by this genotype and on some portions of proteins expressed from Genotypes B/C/D, which display significant variability from Genotype A sequence, as for example set forth in Table 14.

[0093] The overlapping peptide sets of the invention may be prepared by any suitable procedure known to those of skill in the art. For example, the peptide sets can be synthesised conveniently using solution synthesis or solid phase synthesis as described, for example, in Chapter 9 of Atherton and Shephard (1989, Solid Phase Peptide Synthesis: A Practical Approach. IRL Press, Oxford) and in Roberge et al (1995, Science 269: 202). Syntheses may employ, for example, either t-butyloxycarbonyl (t-Boc) or 9-fluorenylmethyloxycarbonyl (Fmoc) chemistries (see Chapter 9.1, of Coligan et al., CURRENT PROTOCOLS IN PROTEIN SCIENCE, John Wiley & Sons, Inc. 1995-1997; Stewart and Young, 1984, Solid Phase Peptide Synthesis, 2nd ed. Pierce Chemical Co., Rockford, Ill.; and Atherton and Shephard, supra). In specific embodiments, the individual peptides are solubilized in DMSO (e.g., 100% pure DMSO) at high concentration (1 mg peptide/10-30 μL DMSO) so that large pools of peptides do not contain excessive amounts of DMSO when pulsed onto cells. In certain advantageous embodiments, one or more peptide sets of the invention, in soluble form, are placed into a single container for convenient administration (e.g. a blood tube or vial for ready re-infusion) to a subject and such containers are also contemplated by the present invention.

[0094] Alternatively, individual peptides may be prepared by a procedure including the steps of: (a) preparing a synthetic construct including a synthetic polynucleotide encoding an individual peptide of an overlapping set of peptides, wherein the synthetic polynucleotide is operably linked to a regulatory polynucleotide; (b) introducing the synthetic construct into a suitable host cell; (c) culturing the host cell to express the synthetic polynucleotide; and (d) isolating the individual peptide. The synthetic construct is preferably in the form of an expression vector. For example, the expression vector can be a self-replicating extra-chromosomal vector such as a plasmid, or a vector that integrates into a host genome. Typically, the regulatory polynucleotide includes, but is not limited to, promoter sequences, leader or signal sequences, ribosomal binding sites, transcriptional start and stop sequences, translational start and termination sequences, and enhancer or activator sequences. Constitutive or inducible promoters as known in the art are contemplated by the invention. The promoters may be either naturally occurring promoters, or hybrid promoters that combine elements of more than one promoter. The regulatory polynucleotide will generally be appropriate for the host cell used for expression. Numerous types of appropriate expression vectors and suitable regulatory polynucleotides are known in the art for a variety of host cells. In certain embodiments, the expression vector contains a selectable marker gene to allow the selection of transformed host cells. Selection genes are well known in the art and will vary with the host cell used. In other embodiments, the expression vector also includes a nucleic acid sequence that codes for a fusion partner so that an individual peptide is expressed as a fusion polypeptide with the fusion partner. The main advantage of fusion partners is that they assist identification and/or purification of the fusion polypeptide. Exemplary fusion partners include, but are not limited to, glutathione-S-transferase (GST), Fc portion of human IgG, maltose binding protein (MBP) and hexahistidine (HIS₆), which are particularly useful for isolation of the fusion polypeptide by affinity chromatography. For the purposes of fusion polypeptide purification by affinity chromatography, relevant matrices for affinity chromatography are glutathione-, amylose-, and nickel- or cobalt-conjugated resins respectively. Many such matrices are available in “kit” form, such as the QIAexpress™ system (Qiagen) useful with (HIS₆) fusion partners and the Pharmacia GST purification system. In a preferred embodiment, the recombinant polynucleotide is expressed in the commercial vector pFLAG™. Advantageously, the fusion partners also have protease cleavage sites, such as for Factor Xₐ, Thrombin and inteins (protein introns), which allow the relevant protease to partially digest the fusion polypeptide of the invention and thereby liberate the recombinant polypeptide of the invention therefrom. The liberated peptide can then be isolated from the fusion partner by subsequent chromatographic separation. Fusion partners according to the invention also include within their scope “epitope tags”, which are usually short peptide sequences for which a specific antibody is available. Well known examples of epitope tags for which specific monoclonal antibodies are readily available include c-Myc, influenza virus, haemagglutinin and FLAG tags.

[0095] The step of introducing the synthetic construct into the host cell may be achieved using any suitable technique including transfection, and transformation, the choice of which will be dependent on the host cell employed. Such methods are well known to those of skill in the art. The peptides of the invention may be produced by culturing a host cell transformed with the synthetic construct. The conditions appropriate for protein expression will vary with the choice of expression vector and the host cell. This is easily ascertained by one skilled in the art through routine experimentation. Suitable host cells for expression may be prokaryotic or eukaryotic. One preferred host cell for expression of a polypeptide according to the invention is a bacterium. The bacterium used may be Escherichia coli. Alternatively, the host cell may be an insect cell such as, for example, SF9 cells that may be utilised with a baculovirus expression system.

[0096] The amino acids of the peptides can be any non-naturally occurring or any naturally occurring amino acid. Examples of unnatural amino acids and derivatives during peptide synthesis include but are not limited to, use of 4-amino butyric acid, 6-aminohexanoic acid, 4-amino-3-hydroxy-5-phenylpentanoic acid, 4-amino-3-hydroxy-6-methylheptanoic acid, t-butylglycine, norleucine, norvaline, phenylglycine, ornithine, sarcosine, 2-thienyl alanine and/or D-isomers of amino acids. A list of unnatural amino acids contemplated by the present invention is shown in TABLE B.

TABLE B

| Non-conventional amino acid | Non-conventional amino acid |
|---|---|
| α-aminobutyric acid | L-N-methylalanine |
| α-amino-α-methylbutyrate | L-N-methylarginine |
| aminocyclopropane-carboxylate | L-N-methylasparagine |
| aminoisobutyric acid | L-N-methylaspartic acid |
| aminonorbornyl-carboxylate | L-N-methylcysteine |
| cyclohexylalanine | L-N-methylglutamine |
| cyclopentylalanine | L-N-methylglutamic acid |
| L-N-methylisoleucine | L-N-methylhistidine |
| D-alanine | L-N-methylleucine |
| D-arginine | L-N-methyllysine |
| D-aspartic acid | L-N-methylmethionine |
| D-cysteine | L-N-methylnorleucine |
| D-glutamate | L-N-methylnorvaline |
| D-glutamic acid | L-N-methylornithine |
| D-histidine | L-N-methylphenylalanine |
| D-isoleucine | L-N-methylproline |
| D-leucine | L-N-medlylserine |
| D-lysine | L-N-methylthreonine |
| D-methionine | L-N-methyltryptophan |
| D-ornithine | L-N-methyltyrosine |
| D-phenylalanine | L-N-methylvaline |
| D-proline | L-N-methylethylglycine |
| D-serine | L-N-methyl-t-butylglycine |
| D-threonine | L-norleucine |
| D-tryptophan | L-norvaline |
| D-tyrosine | α-methyl-aminoisobutyrate |
| D-valine | α-methyl-γ-aminobutyrate |
| D-α-methylalanine | α-methylcyclohexylalanine |
| D-α-methylarginine | α-methylcylcopentylalanine |
| D-α-methylasparagine | α-methy1-β-napthylalanine |
| D-α-methylaspartate | α-methylpenicillamine |
| D-α-methylcysteine | N-(4-aminobutyl)glycine |
| D-α-methylglutamine | N-(2-aminoethyl)glycine |
| D-α-methylhistidine | N-(3-aminopropyl)glycine |
| D-α-methylisoleucine | N-amino-β-methylbutyrate |
| D-α-methylleucine | α-napthylalanine |
| D-α-methyllysine | N-benzylglycine |
| D-α-methylmethionine | N-(2-carbamylediyl)glycine |
| D-α-methylornithiine | N-(carbamylmethyl)glycine |
| D-α-methylphenylalanine | N-(2-carboxyethyl)glycine |
| D-α-methylproline | N-(carboxymethyl)glycine |
| D-α-methylserine | N-cyclobutylglycine |
| D-α-methylthreonine | N-cycloheptylglycine |
| D-α-methyltryptophan | N-cyclohexylglycine |
| D-α-methyltyrosine | N-cyclodecylglycine |
| L-α-methylleucine | L-α-methyllysine |
| L-α-methylmethionine | L-α-methylnorleucine |
| L-αmethylnorvatine | L-αmethylornithine |
| L-α-methylphenylalanine | L-α-methylproline |
| L-α-methylserine | L-α-methylthreonine |
| L-α-methyltryptophan | L-α-methyltyrosine |
| L-αmethylvaline | L-N-methylhomophenylalanine |
| N-(N-(2,2-diphenylethyl | N-(N-(3,3-diphenylpropyl |
| carbamylmethyl)glycine | carbamylmethyl)glycine |
| 1-carboxy-1-(2,2-diphenyl-ethyl | |
| amino)cyclopropane | |

[0097] The invention also contemplates modifying the peptides of the invention using ordinary molecular biological techniques so as to alter their resistance to proteolytic degradation or to optimise solubility properties or to render them more suitable as an immunogenic agent.

### 3. Antigen-presenting Cell Embodiments

[0098] The present invention also discloses the discovery that antigen-presenting cells which have been contacted with overlapping peptide sets as described in Section 2 are potent modulators of immune responses and are especially useful for raising strong immunogenic responses that can prevent or ameliorate the symptoms of a disease or condition of interest. Accordingly, the invention provides a process for producing antigen-specific antigen-presenting cells, comprising contacting antigen-presenting cells or their precursors with one or more sets of peptides as broadly described above for a time and under conditions sufficient for the peptides or processed forms thereof to be presented by the antigen-presenting cells or their precursors, and in the case of precursors, culturing the precursors for a time and under conditions sufficient to differentiate antigen-presenting cells from the precursors.

[0099] The present inventors have also found unexpectedly that, in contrast to current dogma, it is not necessary to culture or activate purified antigen-presenting cells to increase their number or efficiency before loading them with antigen for effective modulation of an immune response to the antigen in a recipient of those cells. Instead, the present inventors have discovered that an uncultured population of antigen-presenting cells or their precursors, which have not been subjected to activating conditions, when contacted with an antigen that corresponds to a target antigen of interest is sufficient to effectively modulate an immune response to the target antigen in a recipient of the contacted population. Accordingly, in another aspect, the present invention provides a process for producing antigen-specific antigen-presenting cells, comprising contacting an uncultured population of antigen-presenting cells or their precursors, which have not been subjected to activating conditions, with an antigen corresponding to the target antigen for a time and under conditions sufficient for the antigen-presenting cells or their precursors to express a processed or modified form of the antigen. Illustrative examples of the uncultured population of antigen-presenting cells or their precursors include whole blood, fresh blood, or fractions thereof such as but not limited to peripheral blood mononuclear cells (PMBC), buffy coat fractions of whole blood, packed red cells, irradiated blood, dendritic cells, monocytes, macrophages, neutrophils, lymphocytes, natural killer cells and natural killer T cells. In specific embodiments, the uncultured population of antigen-presenting cells is selected from freshly isolated blood or PMBC. In other embodiments, the uncultured population of antigen-presenting cells is a necrotic or apoptotic population. Thus, the uncultured population of cells may be contacted with antigen and subsequently subjected to necrotic conditions, which lead to irreversible trauma to cells (e.g., osmotic shock or exposure to chemical poison such as glutaraldehyde), wherein the cells are characterised by marked swelling of the mitochondria and cytoplasm, followed by cell destruction and autolysis. Alternatively, the uncultured cell population is subjected may be contacted with antigen and subsequently subjected to apoptotic conditions. Cells expressing or presenting antigen can be induced to undergo apoptosis in vitro or in vivo using a variety of methods known in the art including, but not limited to, viral infection, irradiation with ultraviolet light, gamma radiation, steroids, fixing (e.g., with glutaraldehyde), cytokines or by depriving donor cells of nutrient's in the cell culture medium. Time course studies can establish incubation periods sufficient for optimal induction of apoptosis in a population of cells. For example, monocytes infected with influenza virus begin to express early markers for apoptosis by 6 hours after infection. Examples of specific markers for apoptosis include Annexin V, TUNEL+ cells, DNA laddering and uptake of propidium iodide.

[0100] According to this aspect of the present invention, the antigen used to contact the population is not limited to the overlapping set of peptides described in Section 2 above but instead encompasses antigens of any biological type including, for example, simple intermediary metabolites, sugars, lipids, and hormones as well as macromolecules such as complex carbohydrates, phospholipids, nucleic acid molecules and proteinaceous molecules. In illustrative examples, the antigen corresponding to the target antigen is selected from whole protein antigens, cellular material (e.g., live or inactivated cancer cells), particulate matter such as, but not limited to, cell debris, apoptotic cells, lipid aggregates such as liposomes, membranous vehicles, microspheres, heat aggregated proteins, virosomes, virus-like particles and whole organisms including, for example, bacteria, mycobacteria, viruses, fungi, protozoa or parts thereof.

[0101] Target antigens may be selected from endogenous antigens produced by a host or exogenous antigens that are foreign to the host, as described for example in Section 2. In certain embodiments, the antigen corresponding to the target antigen is a proteinaceous antigen. Such antigens may be isolated from a natural source or may be prepared by recombinant techniques as known in the art. Alternatively, crude antigen preparations can be produced by isolating a sample of a cell population or tissue for which a modified immune response is desired, and either lysing the sample or subjecting the sample to conditions that will lead to the formation of apoptotic cells (e.g., irradiation with ultra violet or with gamma rays, viral infection, cytokines or by depriving cells of nutrients in the cell culture medium, incubation with hydrogen peroxide, or with drugs such as dexamethasone, ceramide chemotherapeutics and anti-hormonal agents such as Lupron™ or Tamoxifen™). The lysate or the apoptotic cells can then be used as a source of crude antigen for use in soluble form or for contact with antigen-presenting cells as described in more detail below.

3.1 Sources of Antigen-presenting Cells

[0102] The antigen-presenting cells suitably encompass both professional and facultative types of antigen-presenting cells. For example, professional antigen-presenting cells include, but are not limited to, macrophages, monocytes, cells of myeloid lineage, including monocytic-granulocytic-DC precursors, marginal zone Kupffer cells, microglia, T cells, B cells Langerhans cells and dendritic cells including interdigitating dendritic cells and follicular dendritic cells. Examples of facultative antigen-presenting cells include but are not limited to activated T cells, astrocytes, follicular cells, endothelium and fibroblasts. In a preferred embodiment, the antigen-presenting cells are selected from monocytes, macrophages, cells of myeloid lineage, dendritic cells or Langerhans cells.

[0103] Antigen-presenting cells or their precursors can be isolated by methods known to those of skill in the art, The source of antigen-presenting cell or precursor may differ depending upon the antigen-presenting cell required for modulating a specified immune response. In this context, the antigen-presenting cell can be selected from dendritic cells, macrophages, monocytes and other cells of myeloid lineage, Typically, precursors of antigen-presenting cells can be isolated from any tissue, but are most easily isolated from blood, cord blood or bone marrow (Sorg et al., 2001, Exp Hematol 29: 1289-1294; Zheng et al., 2000, J Hematother Stem Cell Res 9: 453-464). It is also possible to obtain suitable precursors from diseased tissues such as rheumatoid synovial tissue or fluid following biopsy or joint tap (Thomas et al, 1994, J Immunol 152: 2613-2623; Thomas et al, 1994, J Immunol 153: 4016-4028). Other examples include, but are not limited to liver, spleen, heart, kidney, gut and tonsil (Lu et al., 1994, Transplantation 64: 1808-1815; McIlroy et al., 2001, Blood 97: 3470-3477; Vremec et al., 2000, J Immunol 164: 2978-2986; Hart and Fabre, 1981, J Exp Med 154(2): 347-361; Hart and McKenzie, 1988, J Exp Med 168(1): 157-170; Pavli et al., 1990, Immunology 70(1): 40-47).

[0104] Leukocytes isolated directly from tissue provide a major source of antigen-presenting cell precursors. Typically, these precursors can only differentiate into antigen-presenting cells by culturing in the presence or absence of various growth factors ex vivo for at least about 6-9 days. However, in some advantageous embodiments of the present invention, antigen-presenting cells or their precursors (e.g., in the form of freshly isolated blood or PMBC) are simply isolated from an individual and incubated in the presence of antigen and preferably one or more growth factors for much shorter periods, e.g., less than about 48, 36, 24, 12, 8, 7, 6, 5, 4, 3 or 2 hours or even less that about 60, 50, 40, 30, 20, 15, 10, 9, 8, 7, 6, 5, 4, 3 or 2 minutes, to produce antigen-specific antigen-presenting cells that are effective in raising an immunogenic response to that antigen.

[0105] In some embodiments, antigen-presenting cell precursors may be differentiated from crude mixtures or from partially or substantially purified preparations of precursors. Leukocytes can be conveniently purified from blood or bone marrow by density gradient centrifugation using, for example, Ficoll Hypaque which eliminates neutrophils and red cells (peripheral blood mononuclear cells or PBMCs), or by ammonium chloride lysis of red cells (leukocytes or white blood cells). Many precursors of antigen-presenting cells are present in peripheral blood as non-proliferating monocytes, which can be differentiated into specific antigen-presenting cells, including macrophages and dendritic cells, suitably by incubating the precursor in the presence of one or more specific cytokines.

[0106] Tissue-derived precursors such as unfractionated lymph node-derived mononuclear cells, precursors of tissue dendritic cells or of Langerhans cells are typically obtained by mincing tissue (e.g., basal layer of epidermis) and digesting it with collagenase or dispase followed by density gradient separation, or selection of precursors based on their expression of cell surface markers. For example, Langerhans cell precursors express CD1 molecules as well as HLA-DR and can be purified on this basis.

[0107] In some embodiments, the antigen-presenting cell precursor is a precursor of macrophages. Generally these precursors can be obtained from monocytes of any source and can be differentiated into macrophages by prolonged incubation in the presence of medium and macrophage colony stimulating factor (M-CSF) (Erickson-Miller et al., 1990, Int J Cell Cloning 8: 346-356; Metcalf and Burgess, 1982, J Cell Physiol 111: 275-283).

[0108] In other embodiments, the antigen presenting cell precursor is a precursor of Langerhans cells. Usually, Langerhans cells can be generated from human monocytes or CD34⁺ bone marrow precursors in the presence of granulocyte/macrophage colony-stimulating factor (GM-CSF), IL-4/INFα and TGFβ (Geissmann et al., 1998, J Exp Med 187: 961-966; Strobl et al., 1997, Blood 90: 1425-1434 Strobl et al, 1997, Adv Exp Med Biol 417: 161-165; Strobl et al., 1996, J Immunol 157: 1499-1507).

[0109] In some embodiments, the antigen-presenting cell precursor is a precursor of dendritic cells. Several potential dendritic cell precursors can be obtained from peripheral blood, cord blood or bone marrow. These include monocytes, CD34⁺ stem cells, granulocytes, CD33⁺CD11c⁺ DC precursors, and committed myeloid progenitors—described below.

[0110] Monocytes. Monocytes can be purified by adherence to plastic for 1-2 h in the presence of tissue culture medium (e.g., RPMI) and serum (e.g., human or foetal calf serum), or in serum-free medium (Anton et a., 1998, Scand J Immunol 47: 116-121.; Araki et al., 2001, Br J Haematol 114: 681-689; Mackensen et al., 2000, Int J Cancer 86: 385-392; Nestle et al., 1998, Nat Med 4: 328-332; Romani et a., 1996, J Immunol Meth 196: 137-151; Thurner et al., 1999, J Immunol Methods 223: 1-15). Monocytes can also be elutriated from peripheral blood (Garderet et al, 2001, J Hematother Stem Cell Res 10: 553-567). Monocytes can also be purified by immunoaffinity techniques, including immunomagnetic selection, flow cytometric sorting or panning (Araki et al., 2001, supra; Battye and Shortman, 1991, Curr. Opin. Immunol. 3: 238-241), with anti-CD14 antibodies to obtain CD14^{hi} cells. The numbers (and therefore yield) of circulating monocytes can be enhanced by the in vivo use of various cytokines including GM-CSF (Groopman et al., 1987, N Engl J Med 317: 593-598; Hill et al, 1995, J Leukoc Biol 58: 634-642). Monocytes can be differentiated into dendritic cells by prolonged incubation in the presence of GM-CSF and IL4 (Romani et a., 1994, J Exp Med 180: 83-93; Romani et al, 1996, supra). A combination of GM-CSF and IL-4 at a concentration of each at between about 200 to about 2000 U/mL, more preferably between about 500 to about 1000 U/mL and even more preferably between about 800 U/mL (GM-CSF) and 1000 U/mL (IL-4) produces significant quantities of immature dendritic cells, i.e., antigen-capturing phagocytic dendritic cells. Other cytokines which promote differentiation of monocytes into antigen-capturing phagocytic dendritic cells include, for example, IL-13.

[0111] CD34⁺ stem cells. Dendritic cells can also be generated from CD34⁺ bone marrow derived precursors in the presence of GM-CSF, TNFα±stem cell factor (SCF, c-kitL), or GM-CSF, IL-4±flt3L (Bai et al., 2002, Int J Oncol 20: 247-53; Chen et at., 2001, Clin Immunol 98: 280-292; Loudovaris et al., 2001, J Hemnatother Stem Cell Res 10: 569-578). CD34⁺ cells can be derived from a bone marrow aspirate or from blood and can be enriched as for monocytes using, for example, immunomagnetic selection or inmmunocolumns (Davis et al., 1994, J Immunol Meth 175: 247-257). The proportion of CD34⁺ cells in blood can be enhanced by the in vivo use of various cytokines including (most commonly) G-CSF, but also flt3L and progenipoietin (Fleming et al., 2001, Exp Hematol 29: 943-951; Pulendran et al., 2000, J Immunol 165: 566-572; Robinson et al., 2000, J Hematother Stem Cell Res 9: 711-720).

[0112] Other myeloid progenitors. DC can be generated from committed early myeloid progenitors in a similar fashion to CD34⁺ stem cells, in the presence of GM-CSF and IL-4/ TNF. Such myeloid precursors infiltrate many tissues in inflammation, including rheumatoid arthritis synovial fluid (Santiago-Schwarz et al., 2001, J Immunol 167(3): 1758-68). Expansion of total body myeloid cells including circulating dendritic cell precursors and monocytes, can be achieved with certain cytokines, including flt-3 ligand, granulocyte colony-stimulating factor (G-CSF) or progenipoietin (pro-GP) (Fleming et al., 2001, supra; Pulendran et al., 2000, supra; Robinson et al., 2000, supra). Administration of such cytokines for several days to a human or other mammal would enable much larger numbers of precursors to be derived from peripheral blood or bone marrow for in vitro manipulation. Dendritic cells can also be generated from peripheral blood neutrophil precursors in the presence of GM-CSF, IL4 and TNFα (Kelly et al., 2001, Cell Mol Biol (Noisy-le-grand) 47(1): 43-54; Oehler et al., 1998, J Exp Med. 187(7):1019-28). It should be noted that dendritic cells can also be generated, using similar methods, from acute myeloid leukemia cells (Oehler et al., 2000, Ann Hematol 79(7): 355-62).

[0113] Tissue DC precursors and other sources of APC precursors. Other methods for DC generation exist from, for example, thymic precursors in the presence of IL-3+/−GM-CSF, and liver DC precursors in the presence of GM-CSF and a collagen matrix. Transformed or immortalised dendritic cell lines may be produced using oncogenes such as v-myc as for example described by (Paglia et al., 1993, J Exp Med 178(6): 1893-901) or by myb (Banyer and Hapel, 1999, J Leukoc Biol 66(2): 217-223; Gonda et al., 1993, Blood 82(9): 2813-2822).

[0114] Circulating DC precursors. These have been described in human and mouse peripheral blood. One can also take advantage of particular cell surface markers for identifying suitable dendritic cell precursors. Specifically, various populations of dendritic cell precursors can be identified in blood by the expression of CD11c and the absence or low expression of CD14, CD19, CD56 and CD3 (O'Doherty et al., 1994, Immunology 82: 487-493; O'Doherty et al., 1993, J Exp Med 178: 1067-1078). These cells can also be identified by the cell surface markers CD13 and CD33 (Thomas et al., 1993, J Immunol 151(12): 6840-6852). A second subset, which lacks CD14, CD19, CD56 and CD3, known as plasmacytoid dendritic cell precursors, does not express CD11c, but does express CD123 (IL-3R chain) and HLA-DR (Farkas et al., 2001, Am J Pathol 159: 237-243; Grouard et al., 1997, J Exp Med 185: 1101-1111; Rissoan et al., 1999, Science 283: 1183-1186). Most circulating CD11c⁺ dendritic cell precursors are HLA-DR⁺, however some precursors may be HLA-DR-. The lack of MHC class II expression has been clearly demonstrated for peripheral blood dendritic cell precursors (del Hoyo et al., 2002, Nature 415: 1043-1047).

[0115] Optionally, CD33⁺CD14^{-/lo} or CD11c⁺HLA-DR⁺, lineage marker-negative dendritic cell precursors described above can be differentiated into more mature antigen-presenting cells by incubation for 18-36 h in culture medium or in monocyte conditioned medium (Thomas et al., 1993, J Immunol 151(12): 6840-6852; Thomas and Lipsky, 1994, J Immunol 153: 4016-4028; O'Doherty et al., 1993, supra). Alternatively, following incubation of peripheral blood non-T cells or unpurified PBMC, the mature peripheral blood dendritic cells are characterised by low density and so can be purified on density gradients, including metrizamide and Nycodenz (Freudenthal and Steinman, 1990, Proc Natl Acad Sci U S A 87: 7698-7702; Vremec and Shortman, 1997, J Immunol 159: 565-573), or by specific monoclonal antibodies, such as but not limited to the CMRF-44 mAb (Fearnley et al, 1999, Blood 93, 728-736; Vuckovic et al., 1998, Exp Hematol 26: 1255-1264). Plasmacytoid dendritic cells can be purified directly from peripheral blood on the basis of cell surface markers, and then incubated in the presence of IL-3 (Grouard et al., 1997, supra; Rissoan et al, 1999, supra). Alternatively, plasmacytoid DC can be derived from density gradients or CMRF-44 selection of incubated peripheral blood cells as above.

[0116] In general, for dendritic cells generated from any precursor, when incubated in the presence of activation factors such as monocyte-derived cytokines, lipopolysaccharide and DNA containing CpG repeats, cytokines such as TNF-α, IL-6, IFN-α, IL-1β, necrotic cells, readherence, whole bacteria, membrane components, RNA or polyIC, immature dendritic cells will become activated (Clark, 2002, J Leukoc Biol 71: 388400; Hacker et al., 2002, Immunology 105: 245-251; Kaisho and Akira, 2002, Biochim Biophtys Acta 1589: 1-13; Koski et al., 2001, Crit Rev Immunol 21: 179-189).

[0117] Other methods for isolation, expansion and/or maturation of dendritic cells are described for example by Takamizawa et al. (1997, J Immunol, 158(5): 2134-2142), Thomas and Lipsky (1994, J Immunol, 153(9): 4016-4028), O'Doherty et al. (1994, Immunology, 82(3): 487-93), Fearnley et al. (1997, Blood, 89(10): 3708-3716), Weissman et al. (1995, Proc Natl Acad Sci USA, 92(3): 826-830), Freudenthal and Steinman (1990, Proc Natl Acad Sci USA, 87(19): 7698-7702), Romani et al. (1996, J Immunol Methods, 196(2): 137-151), Reddy et al. (1997, Blood, 90(9): 3640-3646), Thurnher et al. (1997, Exp Hematol, 25(3): 232-237), Caux et al. (1996, J Exp Med, 184(2): 695-706; 1996, Blood, 87(6): 2376-85), Luft et al. (1998, Exp Hematol, 26(6): 489-500; 1998, J Immunol, 161(4): 1947-1953), Cella et al. (1999, J Exp Med, 189(5): 821-829; 1997, Nature, 388(644): 782-787; 1996, J Exp Med, 184(2): 747-572), Ahonen et al. (1999, Cell Immunol, 197(1): 62-72) and Piemonti et al. (1999, J Immunol, 162(11): 6473-6481).

[0118] In certain embodiments, the antigen-presenting cells or their precursors are in the form of a substantially purified population of cells. In other embodiments, the antigen-presenting cells or their precursors are in the form of a heterogenous pool of cells. Suitably, the substantially purified or heterogenous population used to contact an antigen is in cultured or uncultured form as defined herein. In certain advantageous embodiments employing an uncultured population of antigen-presenting cells or their precursors, the population can be incubated for short time periods (e.g., as low as about 5, 10, 15, 20, 20, 40, 50, 60 min) and the contacted population can be infused directly into a recipient without further culturing of the cells. This further shortens the processing time to permit potentially the harvesting of autologous or syngeneic antigen-presenting cells, treatment of those cells with antigen and infusion of the antigen-contacted cells into a patient in a single sitting or day.

3.2 Delivery of Antigen to Antigen-presenting Cells

[0119] The delivery of exogenous antigen to antigen-presenting cells can be enhanced by methods known to practitioners in the art. For example, several different strategies have been developed for delivery of exogenous antigen to the endogenous processing pathway of antigen-presenting cells, especially dendritic cells. These methods include insertion of antigen into pH-sensitive liposomes (Zhou and Huang, 1994, Immunomethods, 4:229-235), osmotic lysis of pinosomes after pinocytic uptake of soluble antigen (Moore et al., 1988, Cell, 54:777-785), coupling of antigens to potent adjuvants (Aichele et al., 1990, J. Exp. Med., 171: 1815-1820; Gao et al., 1991, J. Immunol., 147: 3268-3273; Schulz et al., 1991, Proc. Natl. Acad. Sci. USA, 88: 991-993; Kuzu et al., 1993, Euro. J. Immunol., 23: 1397-1400; and Jondal et al., 1996, Immunity 5: 295-302) and apoptotic cell delivery of antigen (Albert et al. 1998, Nature 392:86-89; Albert et al. 1998, Nature Med. 4:1321-1324; and in International Publications WO 99/42564 and WO 01/85207). Recombinant bacteria (eg. E. coli) or transfected host mammalian cells may be pulsed onto dendritic cells (as particulate antigen, or apoptotic bodies respectively) for antigen delivery. Recombinant chimeric virus-like particles (VLPs) have also been used as vehicles for delivery of exogenous heterologous antigen to the MHC class I processing pathway of a dendritic cell line (Bachmann et al., 1996, Eur. J. Immunol., 26(11): 2595-2600). In some embodiments, solubilized antigen (e.g., in DMSO) is incubated with antigen-presenting cells.

[0120] Alternatively, or in addition, an antigen (e.g., a peptide antigen) may be linked to, or otherwise associated with, a cytolysin to enhance the transfer of the peptide into the cytosol of an antigen-presenting cell of the invention for delivery to the MHC class I pathway. Exemplary cytolysins include saponin compounds such as saponin-containing Immune Stimulating Complexes (ISCOMs) (see e.g., Cox and Coulter, 1997, Vaccine 15(3): 248-256 and U.S. Pat. No. 6,352,697), phospholipases (see, e.g., Camilli et al., 1991, J Exp. Med. 173: 751-754), pore-forming toxins (e.g., an alpha-toxin), natural cytolysins of gram-positive bacteria, such as listeriolysin O (LLO, e.g., Mengaud et al., 1988, Infect. Immun. 56: 766-772 and Portnoy et al., 1992, Infect. Immun. 60: 2710-2717), streptolysin O (SLO, e.g., Palmer et al., 1998, Biochemistry 37(8): 2378-2383) and perfringolysin O (PFO, e.g., Rossjohn et al., Cell 89(5): 685-692). Where the antigen-presenting cell is phagosomal, acid activated cytolysins may be advantageously used. For example, listeriolysin exhibits greater pore-forming ability at mildly acidic pH (the pH conditions within the phagosome), thereby facilitating delivery of vacuole (including phagosome and endosome) contents to the cytoplasm (see, e.g., Portnoy et al., Infect. Immun. 1992, 60: 2710-2717).

[0121] The amount of antigen to be placed in contact with antigen-presenting cells can be determined empirically by persons of skill in the art. The antigen-presenting cells should be exposed to the antigen for a period of time sufficient for those cells to present the peptides or processed forms thereof for the modulation of T cells. In some advantageous embodiments the antigen-presenting cells are incubated in the presence of antigen for less than about 48, 36, 24, 12, 8, 7, 6, 5, 4, 3 or 2 hours or even for less that about 60, 50, 40, 30, 20, 15, 10, 9, 8, 7, 6, 5, 4, 3 or 2 minutes). The time and dose of peptides necessary for the cells to optionally process and present the peptides or their processed forms may be determined using pulse-chase protocols in which exposure to peptides is followed by a washout period and exposure to a read-out system e.g., antigen reactive T cells. Once the optimal time and dose necessary for cells to express the peptides or their processed forms on their surface is determined, a protocol may be used to prepare cells and peptides for inducing immunogenic responses. Those of skill in the art will recognise in this regard that the length of time necessary for an antigen-presenting cell to present an antigen on its surface may vary depending on the antigen or form of antigen employed, its dose, and the antigen-presenting cell employed, as well as the conditions under which antigen loading is undertaken. These parameters can be determined by the skilled artisan using routine procedures. Efficiency of priming of the antigen-presenting cells can be determined by assaying T cell cytotoxic activity in vitro or using antigen-presenting cells as targets of CTLs. Other methods known to practitioners in the art, which can detect the presence of antigen on the surface of antigen-presenting cells after exposure to one or more of the modified and unmodified antigens, are also contemplated by the presented invention.

[0122] Usually, about 0.1 to 20 μg/mL of antigen (e.g., peptide antigen) to about 1-10 million antigen-presenting cells is suitable for producing primed antigen-specific antigen-presenting cells. Typically antigen-presenting cells are incubated with antigen for about 1 to 6 hr at 37° C., although it is also possible to expose antigen-presenting cells to antigen for the duration of incubation with one or more growth factors. As discussed above, the present inventors have shown that successful presentation of antigen (e.g., peptide antigen) or their processed forms can be achieved using much shorter periods of incubation (e.g., about 5, 10, 15, 20, 30, 40, 50 minutes) using antigen at a concentration of about 10-20 μg/mL.

[0123] If desired, all or a portion of the antigen-presenting cells can be frozen in an appropriate cryopreservative solution, until required. For example, the cells may be diluted in an appropriate medium, such as one containing 10% of autologous serum+10% of dimethylsulfoxide in a phosphate buffer saline. In certain embodiments, the cells are conserved in a dehydrated form.

### 4. Lymphocyte Embodiments

[0124] The antigen-presenting cells of the invention may be obtained or prepared to contain and/or express one or more antigens by any number of means, such that the antigen(s) or processed form(s) thereof, is (are) presented by those cells for potential modulation of other immune cells, including T lymphocytes and B lymphocytes, and particularly for producing T lymphocytes and B lymphocytes that are primed to respond to a specified antigen or group of antigens. In some embodiments, the subject antigen-presenting cells are useful for producing primed T lymphocytes to an antigen or group of antigens. The efficiency of inducing lymphocytes, especially T lymphocytes, to exhibit an immune response to a specified antigen can be determined by any suitable method including, but not limited to, assaying T lymphocyte cytolytic activity in vitro using for example antigen-specific antigen-presenting cells as targets of antigen-specific cytolytic T lymphocytes (CTL); assaying antigen-specific T lymphocyte proliferation (see, e.g., Vollenweider and Groseurth, 1992, J. Immunol. Meth. 149: 133-135), measuring B cell response to the antigen using, for example, ELISPOT assays, and ELISA assays; interrogating cytokine profiles; or measuring delayed-type hypersensitivity (DTH) responses by test of skin reactivity to a specified antigen (see, e.g., Chang et al. (1993, Cancer Res. 53: 1043-1050). Other methods known to practitioners in the art, which can detect the presence of antigen on the surface of antigen-presenting cells after exposure to the antigen, are also contemplated by the present invention.

[0125] Accordingly, the present invention also provides antigen-specific B or T lymphocytes, especially T lymphocytes, which respond in an antigen-specific fashion to representation of the antigen. In some embodiments, antigen-specific T lymphocytes are produced by contacting an antigen-presenting cell as defined above with a population of T lymphocytes, which may be obtained from any suitable source such as spleen or tonsil/lymph nodes but is preferably obtained from peripheral blood. The T lymphocytes can be used as crude preparations or as partially purified or substantially purified preparations, which are suitably obtained using standard techniques as, for example, described in “Immunochemical Techniques, Part G: Separation and Characterization of Lymphoid Cells” (Meth. in Enzymol. 108, Edited by Di Sabato et al., 1984, Academic Press). This includes rosetting with sheep red blood cells, passage across columns of nylon wool or plastic adherence to deplete adherent cells, immunomagnetic or flow cytometric selection using appropriate monoclonal antibodies is known in the art.

[0126] The preparation of T lymphocytes is contacted with the antigen-presenting cells of the invention for an adequate period of time for priming the T lymphocytes to the antigen or antigens presented by those antigen-presenting cells. This period will preferably be at least about 1 day, and up to about 5 days.

[0127] In some embodiments, a population of antigen-presenting cells is cultured in the presence of a heterogeneous population of T lymphocytes, which is suitably obtained from peripheral blood, together with a set of peptides of the invention corresponding to an antigen to which an immune response is required. These cells are cultured for a period of time and under conditions sufficient for the peptides, or their processed forms, to be presented by the antigen-presenting cells; and the antigen-presenting cells to prime a subpopulation of the T lymphocytes to respond to the antigen.

### 5. Cell Based Therapy or Prophylaxis

[0128] The antigen-presenting cells described in Section 3 and the lymphocytes described in Section 4 can be administered to a patient, either by themselves or in combination, for modulating an immune response, especially for modulating an immune response to one or more cognate antigens. These cell based compositions are useful, therefore, for treating or preventing a disease or condition as noted above. The cells of the invention can be introduced into a patient by any means (e.g., injection), which produces the desired immune response to an antigen or group of antigens. The cells may be derived from the patient (i.e., autologous cells) or from an individual or individuals who are MHC matched or mismatched (i.e., allogeneic) with the patient. Typically, autologous cells are injected back into the patient from whom the source cells were obtained. The injection site may be subcutaneous, intraperitoneal, intramuscular, intradermal, intravenous or intralymphoid. The cells may be administered to a patient already suffering from a disease or condition or who is predisposed to a disease or condition in sufficient number to treat or prevent or alleviate the symptoms of the disease or condition. The number of cells injected into the patient in need of the treatment or prophylaxis may vary depending on inter alia, the antigen or antigens and size of the individual. This number may range for example between about 10³ and 10¹¹, and usually between about 10⁵ and 10⁷ cells (e.g., in the form blood, PMBC or purified dendritic cells or T lymphocytes). Single or multiple (2, 3, 4 or 5} administrations of the cells can be carried out with cell numbers and pattern being selected by the treating physician. The cells should be administered in a pharmaceutically acceptable carrier, which is non-toxic to the cells and the individual. Such carrier may be the growth medium in which the cells were grown, or any suitable buffering medium such as phosphate buffered saline. The cells may be administered alone or as an adjunct therapy in conjunction with other therapeutics known in the art for the treatment or prevention of unwanted immune responses for example but not limited to glucocorticoids, methotrexate, D-penicillamine, hydroxychloroquine, gold salts, sulfasalazine, TNF-alpha or interleukin-1 inhibitors, and/or other forms of specific immunotherapy.

### 6. Compositions

[0129] The overlapping sets of peptides described in Sections 2 and the antigen-primed antigen-presenting cells described in Section 3 or the lymphocytes described in Section 4 (therapeutic/prophylactic agents) can be used singly or together as active ingredients for the treatment or prophylaxis of various conditions associated with the presence of one or more target polypeptide antigens. These therapeutic/prophylactic agents can be administered to a patient either by themselves, or in compositions where they are mixed with a suitable pharmaceutically acceptable carrier and/or diluent, or an adjuvant.

[0130] The invention also encompasses a method for stimulating a patient's immune system, and preferably for eliciting a humoral and/or cellular immune response to a polypeptide of interest, by administering to the patient a therapeutic agent or composition as described above. Such stimulation may be utilised for the treatment and/or prophylaxis of a disease or condition including, but not restricted to, a pathogenic infection (e.g., viral, bacterial, fungal, protozoan) or a cancer. Accordingly, the invention contemplates a method for treatment and/or prophylaxis of a disease or condition, comprising administering to a patient in need of such treatment a therapeutically/prophylactically effective amount of a therapeutic agent or composition as broadly described above.

[0131] Depending on the specific conditions being treated, therapeutic/prophylactic agents may be formulated and administered systemically or locally. Techniques for formulation and administration may be found in “Remington's Pharmaceutical Sciences,” Mack Publishing Co., Easton, Pa., latest edition. Suitable routes may, for example, include oral, rectal, transmucosal, or intestinal administration; parenteral delivery, including intramuscular, subcutaneous, intramedullary injections, as well as intrathecal, direct intraventricular, intravenous, intraperitoneal, intranasal, or intraocular injections. For injection, which constitutes one desirable embodiment of the present invention, the therapeutic agents of the invention may be formulated in aqueous solutions, preferably in physiologically compatible buffers such as Hanks' solution, Ringer's solution, or physiological saline buffer. For transmucosal administration, penetrants appropriate to the barrier to be permeated are used in the formulation. Such penetrants are generally known in the art. Intra-muscular and subcutaneous injection is appropriate, for example, for administration of immunogenic compositions, vaccines and DNA vaccines. In certain embodiments of the present invention, the immunogenic compositions are administered intravenously.

[0132] The therapeutic/prophylactic agents can be formulated readily using pharmaceutically acceptable carriers well known in the art into dosages suitable for oral administration. Such carriers enable the compounds of the invention to be formulated in dosage forms such as tablets, pills, capsules, liquids, gels, syrups, slurries, suspensions and the like, for oral ingestion by a patient to be treated. These carriers may be selected from sugars, starches, cellulose and its derivatives, malt, gelatine, talc, calcium sulphate, vegetable oils, synthetic oils, polyols, alginic acid, phosphate buffered solutions, emulsifiers, isotonic saline, and pyrogen-free water.

[0133] Pharmaceutical compositions suitable for use in the present invention include compositions wherein the active ingredients are contained in an effective amount to achieve its intended purpose. The dose of agent administered to a patient should be sufficient to effect a beneficial response in the patient over time such as a reduction in the symptoms associated with the condition. The quantity of the therapeutic/prophylactic agent(s) to be administered may depend on the subject to be treated inclusive of the age, sex, weight and general health condition thereof. In this regard, precise amounts of the therapeutic/prophylactic agent(s) for administration will depend on the judgement of the practitioner. In determining the effective amount of the agent to be administered in the treatment or prophylaxis of the condition, the physician may evaluate tissue levels of a target antigen, and progression of the disease or condition. In any event, those of skill in the art may readily determine suitable dosages of the therapeutic agents of the invention.

[0134] Pharmaceutical formulations for parenteral administration include aqueous solutions of the active compounds in water-soluble form. Additionally, suspensions of the active compounds may be prepared as appropriate oily injection suspensions. Suitable lipophilic solvents or vehicles include fatty oils such as sesame oil, or synthetic fatty acid esters, such as ethyl oleate or triglycerides, or liposomes. Aqueous injection suspensions may contain substances which increase the viscosity of the suspension, such as sodium carboxymethyl cellulose, sorbitol, or dextran. Optionally, the suspension may also contain suitable stabilisers or agents which increase the solubility of the compounds to allow for the preparation of highly concentrated solutions.

[0135] Pharmaceutical preparations for oral use can be obtained by combining the active compounds with solid excipient, optionally grinding a resulting mixture, and processing the mixture of granules, after adding suitable auxiliaries, if desired, to obtain tablets or dragee cores. Suitable excipients are, in particular, fillers such as sugars, including lactose, sucrose, mannitol, or sorbitol; cellulose preparations such as., for example, maize starch, wheat starch, rice starch, potato starch, gelatin, gum tragacanth, methyl cellulose, hydroxypropylmethyl-cellulose, sodium carboxymethylcellulose, and/or polyvinylpyrrolidone (PVP). If desired, disintegrating agents may be added, such as the cross-linked polyvinyl pyrrolidone, agar, or alginic acid or a salt thereof such as sodium alginate. Such compositions may be prepared by any of the methods of pharmacy but all methods include the step of bringing into association one or more therapeutic agents as described above with the carrier which constitutes one or more necessary ingredients. In general, the pharmaceutical compositions of the present invention may be manufactured in a manner that is itself known, e.g., by means of conventional mixing, dissolving, granulating, dragee-making, levigating, emulsifying, encapsulating, entrapping or lyophilising processes.

[0136] Dragee cores are provided with suitable coatings. For this purpose, concentrated sugar solutions may be used, which may optionally contain gum arabic, talc, polyvinyl pyrrolidone, carbopol gel, polyethylene glycol, and/or titanium dioxide, lacquer solutions, and suitable organic solvents or solvent mixtures. Dyestuffs or pigments may be added to the tablets or dragee coatings for identification or to characterise different combinations of active compound doses.

[0137] Pharmaceutical which can be used orally include push-fit capsules made of gelatin, as well as soft, sealed capsules made of gelatin and a plasticiser, such as glycerol or sorbitol. The push-fit capsules can contain the active ingredients in admixture with filler such as lactose, binders such as starches, and/or lubricants such as talc or magnesium stearate and, optionally, stabilisers. In soft capsules, the active compounds may be dissolved or suspended in suitable liquids, such as fatty oils, liquid paraffin, or liquid polyethylene glycols. In addition, stabilisers may be added.

[0138] Dosage forms of the therapeutic agents of the invention may also include injecting or implanting controlled releasing devices designed specifically for this purpose or other forms of implants modified to act additionally in this fashion. Controlled release of an agent of the invention may be effected by coating the same, for example, with hydrophobic polymers including acrylic resins, waxes, higher aliphatic alcohols, polylactic and polyglycolic acids and certain cellulose derivatives such as hydroxypropylmethyl cellulose. In addition, controlled release may be effected by using other polymer matrices, liposomes andlor microspheres.

[0139] Therapeutic agents of the invention may be provided as salts with pharmaceutically compatible counterions. Pharmaceutically compatible salts may be formed with many acids, including but not limited to hydrochloric, sulphuric, acetic, lactic, tartaric, malic, succinic, etc. Salts tend to be more soluble in aqueous or other protonic solvents that are the corresponding free base forms.

[0140] For any compound used in the method of the invention, the effective dose can be estimated initially from cell culture assays. For example, a dose can be formulated in animal models to achieve a circulating concentration range that includes the IC50 as determined in cell culture (e.g., the concentration of a test agent, which achieves a half-maximal reduction in target antigen). Such information can be used to more accurately determine useful doses in humans.

[0141] Toxicity and therapeutic efficacy of the compounds of the invention can be determined by standard pharmaceutical procedures in cell cultures or experimental animals, e.g., for determining the LD50 (the dose lethal to 50% of the population) and the ED50 (the dose therapeutically effective in 50% of the population). The dose ratio between toxic and therapeutic effects is the therapeutic index and it can be expressed as the ratio LD50/ ED50. Compounds that exhibit large therapeutic indices are preferred. The data obtained from these cell culture assays and animal studies can be used in formulating a range of dosage for use in human. The dosage of such compounds lies preferably within a range of circulating concentrations that include the ED50 with little or no toxicity. The dosage may vary within this range depending upon the dosage form employed and the route of administration utilised. The exact formulation, route of administration and dosage can be chosen by the individual physician in view of the patient's condition. (See for example Fingl et al., 1975, in “The Pharmacological Basis of Therapeutics”, Ch. 1 p1).

[0142] Dosage amount and interval may be adjusted individually to provide plasma levels of the active compound(s) which are sufficient to maintain target antigen-reducing effects or effects that ameliorate the disease or condition. Usual patient dosages for systemic administration range from 1-2000 mg/day, commonly from 1-250 mg/day, and typically from 10-150 mg/day. Stated in terms of patient body weight, usual dosages range from 0.02-25 mg/kg/day, commonly from 0.02-3 mg/kg/day, typically from 0.2-1.5 mg/kg/day. Stated in terms of patient body surface areas, usual dosages range from 0.5-1200 mg/m²/day, commonly from 0.5-150 mg/m²/day, typically from 5-100 mg/m²/day.

[0143] Alternately, one may administer the agent in a local rather than systemic manner, for example, via injection of the compound directly into a tissue, often in a depot or sustained release formulation. Furthermore, one may administer the agent in a targeted drug delivery system, for example, in a liposome coated with tissue-specific antibody. The liposomes will be targeted to and taken up selectively by the tissue.

[0144] From the foregoing, it will be appreciated that the agents of the invention may be used as therapeutic or prophylactic immunomodulating compositions or vaccines. Accordingly, the invention extends to the production of immunomodulating compositions containing as active compounds one or more of the therapeutic/prophylactic agents of the invention. Any suitable procedure is contemplated for producing such vaccines. Exemplary procedures include, for example, those described in NEW GENERATION VACCINES (1997, Levine et al., Marcel Dekker, Inc. New York, Basel Hong Kong).

[0145] Immunomodulating compositions according to the present invention can contain a physiologically acceptable diluent or excipient such as water, phosphate buffered saline and saline. They may also include an adjuvant as is well known in the art. Suitable adjuvants include, but are not limited to: surface active substances such as hexadecylamine, octadecylamine, octadecyl amino acid esters, lysolecithin, dimethyldioctadecylammonium bromide, N, N-dicoctadecyl-N′, N′bis(2-hydroxyethyl-propanediamine), methoxyhexadecylglycerol, and pluronic polyols; polyamines such as pyran, dextransulfate, poly IC carbopol; peptides such as muramyl dipeptide and derivatives, dimethylglycine, tuftsin; oil emulsions; and mineral gels such as aluminum phosphate, aluminum hydroxide or alum; lymphokines, QuilA and immune stimulating complexes (ISCOMS).

[0146] The antigen-primed antigen-presenting cells of the invention and antigen-specific T lymphocytes generated with these antigen-presenting cells, as described supra, can be used as active compounds in immunomodulating compositions for prophylactic or therapeutic applications. In some embodiments, the antigen-primed antigen-presenting cells of the invention are useful for generating large numbers of CD8⁺ or CD4+ CTL, for adoptive transfer to immunosuppressed individuals who are unable to mount normal immune responses. For example, antigen-specific CD8+ CTL can be adoptively transferred for therapeutic purposes in individuals afflicted with HIV infection (Koup et al., 1991, J Exp. Med., 174:1593-1600; Carmichael et al., 1993, J. Exp. Med., 177: 249-256; and Johnson et al., 1992, J Exp. Med., 175: 961-971), malaria (H-ill et al., 1992, Nature, 360: 434-439) and malignant tumours such as melanoma (Van der Brogen et al., 1991, Science, 254: 1643-1647; and Young and Steinman, 1990, J. Exp. Med., 171: 1315-1332).

[0147] In other embodiments, the immunomodulating composition of the invention is suitable for treatment or prophylaxis of a cancer. Cancers which could be suitably treated in accordance with the practices of this invention include cancers associated with a viral infection such as cervical cancer (e.g., papillomavirus infection) and Burkitt's lymphoma (e.g., Epstein Barr virus infection). Other virus associated cancers include, but are not restricted to, HTLV1 associated leukemia, Non Hodgkins lymphoma (EBV), anal cancer, skin cancer (HPV), hepatocellular carcinoma (HBV) and Kaposis sarcoma (HHV8). Alternatively, the cancer may be a non-virally associated cancer such as but not limited to melanoma, lung cancer, breast cancer, prostate cancer, colon cancer, pancreatic cancer, stomach cancer, bladder cancer, kidney cancer, post transplant lymphoproliferative disease (PTLD), Hodgkin's Lymphoma and the like.

[0148] In still other embodiments, the immunomodulating composition is suitable for treatment or prophylaxis of a viral, bacterial or protozoan infection. Viral infections contemplated by the present invention include, but are not restricted to, infections caused by HIV, Hepatitis, Influenza, Japanese encephalitis virus, Epstein-Barr virus and respiratory syncytial virus. Bacterial infections include, but are not restricted to, those caused by Neisseria species, Meningococcal species, Haemophilus species Salmonella species, Streptococcal species, Legionella species and Mycobacterium species. Protozoan infections encompassed by the invention include, but are not restricted to, those caused by Plasmodium species (e.g., malaria), Schistosoma species (e.g., schistosomiasis), Leishmania species, Trypanosoma species, Toxoplasma species and Giardia species.

### 7. Methods for Assessing Immunomodulation

[0149] The effectiveness of the immunisation may be assessed using any suitable technique. An individual's capacity to respond to foreign or disease-specific antigens (e.g., viral antigens and cancer antigens) may be determined by assessing whether those cells primed to attack such antigens are increased in number, activity, and ability to detect and destroy those antigens. Strength of immune response is measured by standard tests including: direct measurement of peripheral blood lymphocytes by means known to the art; natural killer cell cytotoxicity assays (see, e.g., Provinciali M. et al (1992, J. Immunol. Meth. 155: 19-24), cell proliferation assays (see, e.g., Vollenweider, I. and Groseurth, P. J. (1992, J. Immunol. Meth. 149: 133-135), immunoassays of immune cells and subsets (see, e.g., Loeffler, D. A., et al. (1992, Cytom. 13: 169-174); Rivoltini, L., et al. (1992, Can. Immunol. Immunother. 34: 241-251); or skin tests for cell-mediated immunity (see, e.g., Chang, A. E. et al (1993, Cancer Res. 53: 1043-1050). Alternatively, the efficacy of the immunisation may be monitored using one or more techniques including, but not limited to, HLA class I tetramer staining—of both fresh and stimulated PBMCs (see for example Allen et al., supra), proliferation assays (Allen et al., supra), ELISPOT assays and intracellular cytoline staining (Allen et al., supra), ELISA Assays—for linear B cell responses; and Western blots of cell sample expressing the synthetic polynucleotides. Particularly relevant will be the cytokine profile of T cells activated by antigen, and more particularly the production and secretion of IFNγ, IL-2, IL4, IL5, IL-10, TGFβ and TNFα.

[0150] The cytotoxic activity of T lymphocytes, and in particular the ability of cytotoxic T lymphocytes to be induced by antigen-presenting cells, may be assessed by any suitable technique known to those of skill in the art. For example, a sample comprising T lymphocytes to be assayed for cytotoxic activity is obtained and the T lymphocytes are then exposed to antigen-primed antigen-presenting cells, which have been caused to present antigen. After an appropriate period of time, which may be determined by assessing the cytotoxic activity of a control population of T lymphocytes which are known to be capable of being induced to become cytotoxic cells, the T lymphocytes to be assessed are tested for cytotoxic activity in a standard cytotoxic assay.

[0151] The method of assessing CTL activity is particularly useful for evaluating an individual's capacity to generate a cytotoxic response against cells expressing tumour or viral antigens. Accordingly, this method is useful for evaluating an individual's ability to mount an immune response to a cancer or virus. For example, CTL lysis assays may be employed using stimulated splenocytes or peripheral blood mononuclear cells (PBMC) on peptide coated or recombinant virus infected cells using ⁵¹Cr labelled target cells. Such assays can be performed using for example primate, mouse or human cells (Allen et al., 2000, J. Immunol 164(9): 49684978 also Woodberry et al., infra). In addition, CTL activity can be measured in outbred primates using the in vivo detection method described in FIG. 1. In this method, autologous cells (e.g., PMBC) are labelled with an optically detectable label (e.g., a fluorescent, chemiluminescent or phosphorescent or visual label or dye) and are contacted with one ore more peptide sets as disclosed herein. The peptide sets are chosen so that they correspond to an antigen which is the subject of a CTL response under test in a subject. The autologous cells are infused into the subject and lymphocytes from the subject are harvested after a suitable period to permit the subject's immune system sufficient time to respond to the autologous cells (e.g., 10 minutes to 24 hours post infusion). The harvested lymphocytes are then analysed to identify the number or proportion of lymphocytes which contain or otherwise carry the optically detectable label, which represents a measure of the in vivo CTL response to the antigen in the subject.

[0152] In order that the invention may be readily understood and put into practical effect, particular preferred embodiments will now be described by way of the following non-limiting examples.

### EXAMPLES

### Example 1

### In Vivo Cytotoxic T-lymphocyte Killing

[0153] The standard measure of virus-specific CTL effector is measured via the release of a radioisotope ⁵¹Cr from target cells, an assay that is tedious and poorly sensitive. By pulsing dye-labelled autologous macaque PBMC with large pools of SIV and SHIV overlapping peptides (OPAL) and infusing the cells back into the same animal, the inventors were able to kinetically show SHIV-specific killing in blood sampled at various time-points following the infusion of OPAL by flow cytometry.

[0154] Two weeks after full immunisation (week 10), three of four immunised animals displayed moderate to large (11.4-76%) killing of gag-pulsed PBMC by 16 hours post-OPAL infusion, whereas control-immunised monkeys displayed <7% gag-specific killing. One immunised animal, monkey H20, demonstrated vigorous gag-specific killing (27.3%) as early as 4 hours post-infusion (FIG. 2). These data were consistent with T cell responses induced by the vaccines as analysed by IFNγ ELISpot and ICS (data not shown), indicating the usefulness of OPAL to measure effective CTL effector responses primed by the DNA and FPV vaccines.

[0155] Shortly (2 weeks) after SHIV intrarectal challenge all four immunised animals exhibited large degrees of gag-specific killing (65-98.3%) 16 hours post-OPAL infusion, and two of four (monkeys H20 and H21) further demonstrated >99% pol-specific killing (FIG. 3). In comparison with control-immunised animals, monkey E20 displayed <6% killing of both gag- and pol-pulsed PBMC whereas monkey E22 showed >90% and 31.9% of gag- and pol-pulsed PBMC, respectively. Interestingly, the animals that displayed moderate to high degrees of pol-specific killing (monkeys H20, H21 and E22) were also the only animals that had previously received 2 doses of infused pol-pulsed PBMC (weeks 10 and 15), whereas monkeys B00, H8 and E20 received pol-pulsed PBMC only once prior. This observation suggests that the infusion of OPAL may have: (a) boosted pol-specific T cell responses primed by the vaccines that were weakly or not detected by IFNγ ELISpot and ICS (data not shown), and; (b) induced pol-specific immunity in naive animals evident post-SHIV challenge.

### Example 2

### Analysis of the Immunogenicity Induced by Infusing Peptide-pulsed Autologous Cells.

[0156] It seemed plausible that if in vivo CTL killing could be efficiently measured by OPAL infusion, this method may be able to either prime a new or boost an existing immune response. IFNγ ELISpot and ICS assays were therefore performed prior to- and one week following each OPAL infusion assay to analyse whether there would be an increase in T cell immunogenicity previously primed by the vaccines or by the OPAL infusion method itself (FIG. 4).

[0157] Following the first OPAL infusion performed at week 10, a 3- to 16-fold increase in IFNγ-secreting cells to SIV gag peptide pool was detected in monkeys H20 and H21, measuring up to 430 spot-forming cells (FIG. 5). Monkey H8 measured a 54% increase to 215 spot-forming cells, whereas no increase was measured in control-immunised animals. Analysis of monkeys B00 (post-OPAL infusion) and E20 (pre-OPAL infusion) for all antigens analysed were excluded due to developmental problems of the assay. Of the four animals that received pol-pulsing at week 10, monkeys H20, H21 and E22, displayed increased pol responses by up to 140 spot-forming cells post-OPAL infusion, whereas no significant ELISpot responses were detected in monkey E20. No nef-specific T cell was in all animals apparent before or after OPAL-infusion. These results suggest a boosting effect in T cell immunogenicity following gag- and pol-peptide pulsing in the animals previously primed for SIVgag/pol responses, and furthermore indicate priming for SIVpol in a naïve animal (monkey E22).

[0158] At week 15, 8 weeks following full immunisation, a second OPAL infusion assay was performed in he six animals. ELISpot analyses revealed increased responses to gag peptide pool by up to 500 spot-forming cells from approximately 50 or less spot-forming cells prior to OPAL infusion in the four animals pre-immunised with DNA and FPV vaccines. In control-immunised animals, no gag-specific T cells were measured before or after the assay (FIG. 6). In comparison, a slight increase in pol-specific responses (up to 40 spot-forming cells) from baseline was measured in only a few animals. Large increased responses to WI SIV were measured in all pre-immunised animals (up to 450 spot-forming cells), whereas control-immunised animals displayed modest or no increases (up to 50 spot-forming cells). All responses to SIV nef and SHIV env were minimal or undetected in all animals prior to and after OPAL infusion.

[0159] Following SHIV intrarectal challenge, all animals except monkey E20 displayed increased gag responses measuring between 50-600 spot-forming cells. Similar responses were observed for WI SIV but to levels up to 200 spot-forming cells, whereas pol responses above 50 spot-forming cells were only evident in monkey H20.

[0160] The immunogenicity of OPAL infusion was further verified by comparison to animals that received the same immunisation regimen but did not receive OPAL infusion (FIG. 7). No rise in SIV gag, pol or WI SIV-specific T cells were detected in groups 1 (control-immunised) and 2 (2×DNA/FPV-immunised) from weeks 9 to 11 and 15 to 18. Responses from weeks 20 to 21 increased slightly the groups, attributable to responses enhanced by SHIV challenge at week 18.

[0161] The experiments performed on macaques infused with peptide pulsed whole blood also demonstrated a boost in CD4+ and CD8+ T cell responses to both (a) several parts of SHIV in recipients of SHIV-peptide pulsed blood (FIG. 9), (b) 2 pools of HCV peptides spanning the entire HCV genome in recipients of HCV-peptide pulsed blood (FIG. 10), and (c) a pool of peptides spanning known HIV-1 drug resistant mutations in recipients of autologous blood pulsed with HIV-1 resistant peptides (FIG. 11).

### Example 3

### Outcome of S HIVₘₙ₂₂₉ Intrarectal Challenge

[0162] The highly pathogenic SHIVₘₙ₂₂₉ challenge stock was inoculated intrarectally into all macaques 10 weeks after full immunisation at a dose of 10⁵ TCID₅₀. Plasma SHIV RNA and CD4+ T cell counts were followed in all control-and 2×DNA/FPV-immunised animals (FIG. 8).

[0163] Control-immunised monkeys E20 and E22 exhibited peak viral loads of 7.8±0.7 log₁₀ copies/mL at 2 weeks following challenge. The peak viral load of monkey E20 may have occurred between week 1 and 2, however, set-point levels of both monkeys (measured 5 to 11 weeks post challenge) remained high at 5.9±0.3 log₁₀ copies/mL. Conversely at week 2, CD4+ T cell counts dropped dramatically to 1.6±1.1% of total lymphocytes, and set-point levels were steady at 0.3±0.2%. Monkeys that received the same immunisations but no OPAL infusions (group 1) performed only marginally worse than monkeys E20 and E22 in terms of peak and set-point viral loads (8.2±0,1 log₁₀ copies/mL and 6.2±0.3 log₁₀ copies/mL), as well as CD4+ counts (set-point 0.5±0.3%).

[0164] Based on the enhanced pol-specific killing that may have been attributed to 2 separate OPAL infusions, the SHIV viral loads and CD4+ T cell counts of monkeys H20 and H21 were compared to monkeys B00 and H8 that received only 1 dose of pol-OPAL infusions. Peak viral load of monkeys H20 and H21 (receiving 2 pol-OPAL infusions) was at least 10-fold lower than monkeys B00 and H8 (5.9±1.3 vs. 7.1±0.4 log₁₀ copies/mL, P=0.08), and set-point viral load showed a trend towards being lower (4.1±0.9 vs. 5.4±0.7 log₁₀ copies/mL, P=0.08, student's t test). Incidentally, set-point CD4+ T cell count for monkeys H20 and H21 was significantly greater than monkeys B00 and H8 (18.9±6.1% vs. 8.4%, P=0.02). Although statistically insignificant in comparison with group 2 animals who received the same immunisations but no OPAL infusions (P=0.12), monkeys H20 and H21 that received multiple pol-OPAL infusions displayed a trend towards the retainment of CD4+ T cells although viral loads were relatively similar, indicative of viral challenge protection. Set-point CD4+ T cell count and viral load of group 2 were 13.0±3.7% and 4.8±0.2 log₁₀ copies/mL, respectively.

[0165] In comparison to control-immunised monkeys E20 and E22, both set-point viral load and CD4+ T cell count of monkeys H20 and H21 were significantly different (P=0.01, P=0.00). The set-point viral load of monkeys B00 and H8, on the other hand, was not significantly lower than monkeys E20 and E22 (P=0.37) despite significant set-point levels of CD4+ T cells (P=0.01). Note that monkey H20 had completely cleared plasma viral RNA from week 5 and onwards and retained CD4+ T cells at normal levels.

### Discussion of the Examples

[0166] The vital role for HIV-1-specific CD4+ T-helper (Th) and CD8+ CTL responses in controlling HIV-1 replication is the focus of many current vaccine concepts. The infusion of autologous PBMC pulsed with large overlapping sets of SHIV 15 mer peptides (OPAL) was surprisingly immunogenic in its ability to boost SHIV-specific immune responses as analysed by IFNγ ELISpot and ICS assays. This finding forms the potential basis of a novel vaccine or immunotherapeutic strategy as described herein.

[0167] The evidence for this immunogenicity of peptide-pulsed fresh PBMC was five-fold: (a) Increases in SIV gag-specific IFNγ ELISpot responses were observed one week after each of the 3 SIV gag OPAL infusions (week 10, 15, and 20) in all vaccinated monkeys. In contrast, at week 10 and 15, SIVgag responses in equivalently immunised animals (group 2) not receiving the OPAL infusion significantly declined. (b) Increases in SIV pol-specific IFNγ ELISpot responses were observed in immunised animals one week following the SIV pol infusion at week 10 and 20. Interestingly this was observed in only the two monkeys H20 and H21 that received multiple SIV pol OPAL infusions prior to SHIV challenge (weeks 10 and 15) and not in animals receiving SIV pol peptide pulsed cells at week 15. This is of particular interest since the pol-specific T cell responses to the DNA and FPV vaccines alone were modest or undetectable by ELISpot and ICS. (c) High levels of SIV pol-specific in vivo killing were also seen in the two monkeys that received 2 prior infusions of SIV pol OPAL infusions. (d) This immunogenicity data was further confirmed by high levels of SIV pol-specific IFNγ intracellular cytokine responses in the two immunised animals receiving the multiple SIV pol OPAL infusions. (e) There was a trend towards greater protection from SHIV challenge in animals receiving multiple OPAL infusions. Together, these results suggest that pulsing autologous PBMC ex vivo with pools of overlapping peptides is an effective method for boosting immune responses. In addition, data show that peptide pulsed whole blood can both stimulate T cell responses to several parts of SHIV in recipients of SHIV-peptide pulsed blood, as well as induce de novo T cell responses to (a) 2 pools of HCV peptides spanning the entire HCV genome in recipients of HCV-peptide pulsed blood and (b) a pool of peptides spanning known HIV-1 drug resistant mutations in recipients of autologous blood pulsed with HIV-1 resistant peptides.

[0168] There is a body of data ascertaining the use of pulsing autologous or syngeneic cells with defined peptide epitopes or whole antigen for the induction (or ‘cross-priming’) of immune responses (22, 23, 27, 34, 35). The use of specialised antigen presenting cells such as monocyte-derived dendritic cells pulsed with, for example, single tumour antigens or whole inactivated SIV has also been studied extensively as an immunotherapeutic tool (36-39). However, to the inventors' knowledge this is the first report of utilising large peptide pools spanning an entire protein (125 SIV gag 15 mers or 263 SIV pol 15 mers) and the use of whole PBMC cultured for short periods ex vivo, as a method of boosting immune responses.

[0169] In one control-immunised animal, monkey B22, which received multiple infusions of PMBC pulsed with SIV pol (and SIV gag), a modest induction of SIV gag and SIV pol-specific IFNγ ELISpot responses was detected. This animal subsequently had high levels of SIV gag- and pol-specific killing analysed at week 20, presumably from the boosting effect of the SHIV challenge. The efficiency of priming an immune response by OPAL infusion therefore seems feasible. These data were confirmed when whole blood was pulsed with HCV or HIV-1 drug resistant peptides, which efficiently induced high levels of CD4+ and CD8+ T cell responses as assessed by ICS. These data also demonstrate the feasibility of using whole blood as an antigen-presenting cell (APC) source, which would be more practical than PBMC or other more complex APC preparations (such as monocyte-derived dendritic cells) in the field.

[0170] Further modifications to the OPAL technique, such as the enrichment for APC and/or dendritic cells (DC) (40), would potentially enhance the immunogenicity of OPAL infusion as a therapeutic vaccine since DC cultured from PBMC of HIV-infected patients (41, 42) and SIV-infected animals (40) can elicit potent T-cell responses. Alternatively, the prospect of using whole blood rather than PBMC fractions as a means of delivering OPAL will certainly benefit a clinical setting, particularly for HIV-infected persons. Furthermore, a smaller whole blood sample may not require as high a concentration of peptide since 1 μg/mL is effective in vitro for whole blood analysis by ICS. It is also conceivable that direct intravenous infection of pooled peptides would mimic the immunogenicity of the OPAL effect. The use of consensus HIV-1 lade peptide sets of gag and pol offers the broad epitopic breadth desired of an effective therapeutic vaccine for humans. The Immunogenicity of antigens that regulate viral replication, such as rev, tat, vpu, vif and vpr, which are poorly immunogenic by current vaccine approaches, should also be improved using this strategy. In addition, the general method of using blood or PBMC or other uncultured APC-containing fraction directly as an APC source immediately suggests the possibility of pulsing other sources of antigen (including but not limited to whole protein, DNA, live vector vaccines or cancer cell preparations) onto such APC populations prior to infusion. It is believed that such antigen-loaded cell APC populations could be more immunogenic (presumably by binding directly to abundant APCs) than administering the antigen by other common methods such as intramuscularly (where few APCs exist).

### Example 4

### Material and Methods

### Animals

[0171] Male juvenile, colony-bred pigtailed macaques (Macaca nemestrina, aged 2-4 years) were studied. All animals were housed under PC3 biosafety conditions by trained animal technicians at the CSIRO Australian Animal Health Laboratory, Geelong. Prior to all procedures, animals were anaesthetised with ketamine (10 mg/kg, intramuscularly). Health and weight were routinely monitored. All conditions and protocols were approved by the CSIRO animal health and the University of Melbourne animal ethics committees.

### Pre-immunisations

[0172] To evaluate whether the OPAL method could boost T cell responses in animals with pre-primed responses. T cell responses were induced in macaques by administering 2 DNA vaccines expressing HIV or SIV structural genes followed by a FPV boost vaccine expressing similar HIV or SIV genes as previously described (16). DNA vaccines in saline were administered twice intramuscularly (0.5 mL to each anterior quadracep) at a dose of 1 mg/dose. FPV boosts were delivered intramuscularly a dose of 5×10⁷ pfu.

### Isolation of Plasma and Peripheral Blood Mononuclear Cells PBMC) from Whole Blood

[0173] Blood was collected in 9 mL Na+ Heparin and 3 mL EDTA vacutainers from the femoral vein of each animal on study weeks prior to and after vaccination and SHIV challenge. Plasma samples were removed following centrifugation (800×g, room temperature, RT, 8 min; Beckman Coulter) and stored in 3×1.5-mL tubes at −70° C. Plasma collected in EDTA-anticoagulated blood was used for RNA extraction. Media (RPMI-1640 supplemented with penicillin, streptomycin and glutamine; Invitrogen) equal to the volume of plasma collected was added to the blood and mixed prior to PBMC isolation on Ficoll-Paque, used according to the manufacturer's instructions (Amersham Pharmacia). PBMC were washed-twice (500×g, 10° C., 6 min) and resuspended in 1 mL media for counting (Beckman Coulter Counter®) in preparation of immunological assays.

### Overlapping Peptides

[0174] 15-mer peptides (>80% purity) overlapping by 11 amino acids spanning the entire gag (125 peptides), pol (260 peptides) and nef (21 peptides) of SIV_{mac239} and env (211 peptides) protein of SHIV_{SF162P3} (NIH ADS Research and Reference Reagent depository) (Tables 1-4) were pooled for each protein by solubilising each 1 mg peptide aliquot in 10-40 μL of DMSO to final concentrations: SIV_{mac239} gag (670 μg/mL or 730 μg/mL); pol (304 μg/mL), and; nef (4.762 mg/mL), and; SHIV_{SF162P3} env (330 μg/mL), stored at −70° C. until use. 18 mer peptides overlapping by 11 amino acids spanning the entire HCV open reading frames (NIH AIDS Research and Reference Reagent depository) were pooled into 2 pools (HCV1 and HCV2) encompassing the structural and regulatory genes of HCV. Non-overlapping 17 mer peptides spanning known sites of HIV-1 drug resistance mutations were specifically designed and purchased from Mimotopes Australia (FIG. 12).

### SIV Antigens for in Vitro Analyses

[0175] Whole inactivated SIV (WI SIV) and its control (supernatant from Hut78-CLE cell-line used to culture the WI SIV) (AIDS Vaccine Program, National Cancer Institute, MD) were stored at −70° C. until use.

### In Vivo Cytotoxic T lymphocyte killing

[0176] At weeks 10, 15 and 20 following the initial vaccination, PBMC from the macaques were isolated from 40-50 mL blood, as described above. 25 mL sterile injectable saline was infused into the animals immediately after blood sampling to prevent hypovolemia. PBMC were resuspended in PBS and divided into 3 or 4 equal volumes, 0.5 mL. Cells were pulsed with SIVgag, pol, nef or SHIVenv peptide pools (10 μg/mL) or DMSO (volume of equal to the volume of SIVgag), in PBS for 90 min at 37° C., or on ice, with regular mixing. To subsequently track each peptide-pulsed cell population by flow cytometry, each peptide/DMSO-pulsed population was then labelled with a concentration of CFSE or SNARF (Molecular Probes). 5 mM CFSE stock in DMSO at−20° C. was thawed and diluted in PBS. Neat SNARF stock was dissolved in 83 μLDMSO to make 1 mM and diluted in PBS. Table 1 shows the final concentrations of each dye. Cells were mixed thoroughly and stained for 10 min in a 37° C. waterbath, followed by one wash in RF5 then PBS (500×g, 10° C., 6 min). All peptide/DMSO-pulsed cells for each animal were pooled in 1.5 mL saline for re-infusion into the femoral vein. 3 mL blood was sampled from the opposite femoral vein at 5 min, and at 4 and 16 hr following infusion. Red blood cells were lysed with 10 mL FACS Lysing Solution (BD Biosciences), incubated for 10 min at room temp. Cells were pelleted and washed twice with PBS (800×g, RT, 7 min), and fixed with 1-2 mL 2% paraformaldehyde (FIG. 1).

[0177] To determine whether cell populations were being selectively killed, 10⁶ events gated live lymphocytes were collected by flow cytometry (FACSort Calibre, BD). CFSE and SNARF fluorescence were detected by FL1 and FL2 channels, respectively. For analysis, killing was expressed as the percentage of target versus control peptide-pulsed cell clearance. In the event of acquiring unequal labelled populations by flow cytometry at 5 minutes post-OPAL infusion, the degree of killing was subsequently scaled with respect to the initial population ratios obtained at 5 minutes. PBMC were also analysed prior to, and following, OPAL-infusion by IFNγ ELISpot and ICS to detect whether T cell immune responses were enhanced.

### SHIV Challenge of Macaques

[0178] To assess the efficacy to the vaccines, each macaque was inoculated intrarectally with SHIVₘₙ₂₂₉ (5×10⁴ TCID₅₀/mL on CD8-depleted M. nemestrina PBMC) in 0.5 mL doses over 2 days (total 10⁵ TCID₅₀/mL) 18 weeks after the initial immunisation, as previously described (32).

### Ouantification of Viral SHIV RNA by Reverse-transcriptase Real-time PCR

[0179] RNA extraction: To detect SHIV RNA in macaques following SHIV challenge, total RNA was initially extracted from stored plasma samples from anti-coagulated blood collected in EDTA with QIAamp® Viral RNA commercial kit (Qiagen) as previously described (32). Briefly, plasma samples were centrifuged (500×g, RT, 10 min) to remove cells (preventing DNA contamination). 140 μL plasma RNA coupled to Carrier RNA in Buffer AVL and 96-100% ethanol was centrifuged and bound to a filter membrane. 60 μL RNA was eluted with Buffer AW1 and AW2 through a spin column. All reagents except ethanol supplied by kit.

[0180] Reverse-transcriptase PCR: 10 μL RNA was then reverse transcribed into cDNA, in duplicate, with the reaction mixture (20 μL): 2.9 μL RNAse/DNAse-free water (Promega); 3 μL 10×TaqMan buffer A (Applied Biosystems); 6 μL MgCl₂ (25 nM) (Applied Biosystems); 1.5 μL Random Hexamers (diluted ½; Applied Biosystems); 6 μl dNTPs (2.5 nM; Promega); 1.5 μL; Promega); 0.5 μL Rnasin (40 U/mL; Promega); 0.1 μL MMLV-RT superscript (200U/mL; Invitrogen), for one thermal cycle: 25° C. (15min)→42° C. (40 min)→75° C. (5 min) (GeneAmp PCR System 9700, Applied Biosystems). A third test per sample was set up to assess the presence of SHIV DNA contamination, using the same reaction mix excluding MMLV-RT superscript. SIV RNA standards (33) were serially diluted and reverse-transcribed in duplicate (limit of detection, 1500 copies/mL).

[0181] Real-time PCR: cDNA was amplified with reaction mixture (20 μl): 141 μl RNAse/DNAse-free water (Promega); 2 μL 10×PCR buffer II (Applied Biosystems); 1 μL MgCl₂ (Applied Biosystems); 1 μL SL03 SIVgag (20 pmol/μL); 1 μL SL04 SIVgag (20 pmol/□L); 0.3 μL SL07 molecular beacon 0.5 μL Tag Gold (Applied Biosystems) as previously described (33). Reaction temperature was initially raised and held at 95 ° C. for 10 min to activate Tag Gold enzyme, followed by 45 thermal cycles: 95° C. (15 sec)→55° C. (30 sec)→72° C. (30 sec). Real-time analysis was performed on amplicon detection at 550° C. (30 sec) stages by Sequence Detector software v1.6.3 (Applied Biosystems).

### CD4+ T Cell Counts

[0182] To assess the depletion of CD4+ T cells following SHIV challenge, 200 μL whole blood was incubated with 5 μL PE-conjugated anti-human CD3, 5 μL FITC-conjugated anti-human CD4, 5 μL PerCP-conjugated anti-human CD8 (clone SP34; L200, and; Leu-2a, respectively; BD Pharmingen) monoclonal antibodies for 20 min in dark, RT. Red blood cells were lysed with 2 mL FACS Lysing Solution (BD Biosciences) and fixed as described in method 2.8. 50,000 total events were collected by 3-colour FACScan Calibre® and CD4+ and CD8+ T cell counts expressed as the percentage of gated lymphocytes.

### Analysis of Stimulation or Induction of SHIV, HCV and Peptides Derived from Resistant HIV-1 Strains by the Whole Blood OPAL Technique

[0183] In a separate experiment to assess (a) whether peptide-pulsed whole blood (as compared to PBMC which had be used previously) could be effectively used as an immune stimulant and (b) whether the OPAL technique could stimulate de novo, un-primed, immune responses, selected SHIV-infected macaques were infused with either whole blood pulsed at 5 μg/mL for 1 hr with either a series of overlapping 15 mer SHIV peptides (3 pools) or a series of overlapping 18 mer HCV peptides (2 pools) and a series of non-overlapping 17 mer peptides encompassing known mutations induced by HIV-1 drugs as illustrated in FIGS. 9-12.

[0184] The disclosure of every patent, patent application, and publication cited herein is hereby incorporated herein by reference in its entirety.

[0185] The citation of any reference herein should not be construed as an admission that such reference is available as “Prior Art” to the instant application.

[0186] Throughout the specification the aim has been to describe the preferred embodiments of the invention without limiting the invention to any one embodiment or specific collection of features. Those of skill in the art will therefore appreciate that, in light of the instant disclosure, various modifications and changes can be made in the particular embodiments exemplified without departing from the scope of the present invention. All such modifications and changes are intended to be included within the scope of the appended claims.

TABLE 1

One embodiment of an SIV_{mac236} gag peptide pool
sequence. Each peptide is 15 amino acids in
length and overlaps the preceding peptide by 11
amino acids. Peptide 125 is 14 amino acids in
length. The full-length gag sequence [SEQ ID
NO:2184] is modified from the HIV sequence
database httv://hiv-web.lanl.gov.

| | | |
|---|---|---|
| # | PEPTIDE | SEQUENCE ID |

| | | |
|---|---|---|
| 1 | MGVRNSVLSGKKADE | SEQ ID NO:1 |
| 2 | NSVLSGKKADELEKI | SEQ ID NO:2 |
| 3 | SGKKADELEKIRLRP | SEQ ID NO:3 |
| 4 | ADELEKIRLRPNGKK | SEQ ID NO:4 |
| 5 | EKIRLRPNGKKKYML | SEQ ID NO:5 |
| 6 | LRPNGKKKYMLKHVV | SEQ ID NO:6 |
| 7 | GKKKYMLKHVVWAAN | SEQ ID NO:7 |
| 8 | YMLKHVVWAANELDR | SEQ ID NO:8 |
| 9 | HVVWAANELDRFGLA | SEQ ID NO:9 |
| 10 | AANELDRFGLAESLL | SEQ ID NO:10 |
| 11 | LDRFGLAESLLENKE | SEQ ID NO:11 |
| 12 | GLAESLLENKEGCQK | SEQ ID NO:12 |
| 13 | SLLENKEGCQKILSV | SEQ ID NO:13 |
| 14 | NKEGCQKILSVLAPL | SEQ ID NO:14 |
| 15 | CQKILSVLAPLVPTG | SEQ ID NO:15 |
| 16 | LSVLAPLVPTGSENL | SEQ ID NO:16 |
| 17 | LSVLAPLVPTGSENL | SEQ ID NO:17 |
| 18 | PTGSENLKSLYNTVC | SEQ ID NO:18 |
| 19 | ENLKSLYNTVCVIWC | SEQ ID NO:19 |
| 20 | SLYNTVCVIWCIHAE | SEQ ID NO:20 |
| 21 | TVCVIWCIHAEEKVK | SEQ ID NO:21 |
| 22 | IWCIHAEEKVKHTEE | SEQ ID NO:22 |
| 23 | HAEEKVKHTEEAKQI | SEQ ID NO:23 |
| 24 | KVKHTEEAKQIVQRH | SEQ ID NO:24 |
| 25 | TEEAKQIVQRHLVVE | SEQ ID NO:25 |
| 26 | KQIVQRHLVVETGTT | SEQ ID NO:26 |
| 27 | QRELVVETGTTETMP | SEQ ID NO:27 |
| 28 | VVETGTTETMPKTSR | SEQ ID NO:28 |
| 29 | GTTETMPKTSRPTAP | SEQ ID NO:29 |
| 30 | TMPKTSRPTAPSSGR | SEQ ID NO:30 |
| 31 | TSRPTAPSSGRGGNY | SEQ ID NO:31 |
| 32 | TAPSSGRGGNYPVQQ | SEQ ID NO:32 |
| 33 | SGRGGNYPVQQIGGN | SEQ ID NO:33 |
| 34 | GNYPVQQIGGNYVHL | SEQ ID NO:34 |
| 35 | VQQIGGNYVHLPLSP | SEQ ID NO:35 |
| 36 | GGNYVHLPLSPRTLN | SEQ ID NO:36 |
| 37 | VHLPLSPRTLNAWVK | SEQ ID NO:37 |
| 38 | LSPRTLNAWVKLIEE | SEQ ID NO:38 |
| 39 | TLNAWVKLIEEKKFG | SEQ ID NO:39 |
| 40 | WVKLIEEKKFGAEVV | SEQ ID NO:40 |
| 41 | IEEKKFGAEVVPGFQ | SEQ ID NO:41 |
| 42 | KFGAEVVPGFQALSE | SEQ ID NO:42 |
| 43 | EVVPGFQALSEGCTP | SEQ ID NO:43 |
| 44 | GFQALSEGCTPYDIN | SEQ ID NO:44 |
| 45 | LSEGCTPYDINQMLN | SEQ ID NO:45 |
| 46 | CTPYDINQMLNCVGD | SEQ ID NO:46 |
| 47 | DINQMLNCVGDHQAA | SEQ ID NO:47 |
| 48 | MLNCVGDHQAAMQII | SEQ ID NO:48 |
| 49 | VGDHQAAMQIIRDII | SEQ ID NO:49 |
| 50 | QAAMQIIRDIINEEA | SEQ ID NO:50 |
| 51 | QIIRDIINEEAADWD | SEQ ID NO:51 |
| 52 | DIINEEAADWDLQHP | SEQ ID NO:52 |
| 53 | EEAADWDLQHPQPAP | SEQ ID NO:53 |
| 54 | DWDLQHPQPAPQQGQ | SEQ ID NO:54 |
| 55 | QHPQPAPQQGQLREP | SEQ ID NO:55 |
| 56 | PAPQQGQLREPSGSD | SEQ ID NO:56 |
| 57 | QGQLREPSGSDIAGT | SEQ ID NO:57 |
| 58 | REPSGSDIAGTTSSV | SEQ ID NO:58 |
| 59 | GSDIAGTTSSVDEQI | SEQ ID NO:59 |
| 60 | AGTTSSVDEQIQMMY | SEQ ID NO:60 |
| 61 | SSVDEQIQWNYRQQN | SEQ ID NO:61 |
| 62 | EQIQWMYRQQNPIPV | SEQ ID NO:62 |
| 63 | WMYRQQNPIPVGNIY | SEQ ID NO:63 |
| 64 | QQNPIPVGNIYRRWI | SEQ ID NO:64 |
| 65 | IPVGNIYRRWIQLGL | SEQ ID NO:65 |
| 66 | NIYRRWIQLGLQKCV | SEQ ID NO:66 |
| 67 | RWIQLGLQKCVRMYN | SEQ ID NO:67 |
| 68 | LGLQKCVRMYNPTNI | SEQ ID NO:68 |
| 69 | KCVRMYNPTNILDVK | SEQ ID NO:69 |
| 70 | MYNPTNILDVKQGPK | SEQ ID NO:70 |
| 71 | TNILDVKQGPKEPFQ | SEQ ID NO:71 |
| 72 | DVKQGPKEPFQSYVD | SEQ ID NO:72 |
| 73 | GPKEPFQSYVDRFYK | SEQ ID NO:73 |
| 74 | PFQSYVDRFYKSLRA | SEQ ID NO:74 |
| 75 | YVDRFYKSLRAEQTD | SEQ ID NO:75 |
| 76 | FYKSLRAEQTDAAVK | SEQ ID NO:76 |
| 77 | LRAEQTDAAVKNWMT | SEQ ID NO:77 |
| 78 | QTDAAVKNWMTQTLL | SEQ ID NO:78 |
| 79 | AVKNWMTQTLLIQNA | SEQ ID NO:79 |
| 80 | WMTQTLLIQNANPDC | SEQ ID NO:80 |
| 81 | TLLIQNANPDCKLVL | SEQ ID NO:81 |
| 82 | QNANPDCKLVLKGLG | SEQ ID NO:82 |
| 83 | PDCKLVLKGLGVNPT | SEQ ID NO:83 |
| 84 | LVLKGLGVNPTLEEM | SEQ ID NO:84 |
| 85 | GLGVNPTLEEMLTAC | SEQ ID NO:85 |
| 86 | NPTLEEMLTACQGVG | SEQ ID NO:86 |
| 87 | EEMLTACQGVGGPGQ | SEQ ID NO:87 |
| 88 | TACQGVGGPGQKARL | SEQ ID NO:8B |
| 89 | GVGGPGQKARLMAEA | SEQ ID NO:89 |
| 90 | PGQKARLMAEALKEA | SEQ ID NO:90 |
| 91 | ARLMAEALKEALAPV | SEQ ID NO:91 |
| 92 | AEALKEALAPVPIPF | SEQ ID NO:92 |
| 93 | KEALAPVPIPFAAAQ | SEQ ID NO:93 |
| 94 | APVPIPFAAAQQRGP | SEQ ID NO:94 |
| 95 | IPFAAAQQRGPRKPI | SEQ ID NO:95 |
| 96 | AAQQRGPRKPIKCWN | SEQ ID NO:96 |
| 97 | RGPRKPIKCWNCGKE | SEQ ID NO:97 |
| 98 | KPIKCWNCGKEGHSA | SEQ ID NO:98 |
| 99 | CWNCGKEGHSARQCR | SEQ ID NO:99 |
| 100 | GKEGHSARQCRAPRR | SEQ ID NO:100 |
| 101 | HSARQCRAPRRQGCW | SEQ ID NO:101 |
| 102 | QCRAPRRQGCWICCGK | SEQ ID NO:102 |
| 103 | PRRQGCWKCGKMDHV | SEQ ID NO:103 |
| 104 | GCWKCGKMDHVMAKC | SEQ ID NO:104 |
| 105 | CGKMDHVMAKCPDRQ | SEQ ID NO:105 |
| 106 | DHVMAKCPDRQAGFL | SEQ ID NO:106 |
| 107 | AKCPDRQAGFLGLGP | SEQ ID NO:107 |
| 108 | DRQAGFLGLGPWGKK | SEQ ID NO:108 |
| 109 | GFLGLGPWGKKPRNF | SEQ ID NO:109 |
| 110 | LGPWGKKPRNFPMAQ | SEQ ID NO:110 |
| 111 | GKKPRNFPMAQVHQG | SEQ ID NO:111 |
| 112 | RNFPMAQVHQGLMPT | SEQ ID NO:112 |
| 113 | MAQVHQGLMPTAPPE | SEQ ID NO:113 |
| 114 | HQGLMPTAPPEDPAV | SEQ ID NO:114 |
| 115 | MPTAPPEDPAVDLLK | SEQ ID NO:115 |
| 116 | PPEDPAVDLLKNYMQ | SEQ ID NO:116 |
| 117 | PAVDLLKNYMQLGKQ | SEQ ID NO:117 |
| 118 | LLKNYMQLGKQQREK | SEQ ID NO:118 |
| 119 | YMQLGKQQREKQRES | SEQ ID NO:119 |
| 120 | GKQQREKQRESREKP | SEQ ID NO:120 |
| 121 | REKQRESREKPYKEV | SEQ ID NO:121 |
| 122 | RESREKPYKEVTEDL | SEQ ID NO:122 |
| 123 | EKPYKEVTEDLLHLN | SEQ ID NO:123 |
| 124 | KEVTEDLLHLNSLFG | SEQ ID NO:124 |
| 125 | EDLLHLNSLFGGDQ | SEQ ID NO:125 |

[0187] TABLE 2

One embodiment of an SIV_{mac236} pol peptide pool
sequence. Each peptide is 15 amino acids in
length and overlaps the preceding peptide by 11
amino acids. The full-length pol sequence [SEQ
ID NO:2185] is modified from the REV sequence
database http://hiv-web.lanl.gov.

| | | |
|---|---|---|
| # | PEPTIDE | SEQUENCE ID |

| | | |
|---|---|---|
| 1 | VLELWERGTLCKAMQ | SEQ ID NO:126 |
| 2 | WERGTLCKAMQSPKK | SEQ ID NO:127 |
| 3 | TLCKAMQSPKKTGML | SEQ ID NO:128 |
| 4 | AMQSPKKTGMLEMWK | SEQ ID NO:129 |
| 5 | PKKTGMLEMWKNGPC | SEQ ID NO:130 |
| 6 | GMLEMWKNGPCYGQM | SEQ ID NO:131 |
| 7 | MWKNGPCYGQMPRQT | SEQ ID NO:132 |
| 8 | GPCYGQMPRQTGGFF | SEQ ID NO:133 |
| 9 | GQMPRQTGGFFRPWS | SEQ ID NO:134 |
| 10 | RQTGGFFRPWSMGKE | SEQ ID NO:135 |
| 11 | GFFRPWSMGKEAPQF | SEQ ID NO:136 |
| 12 | PWSMGKEAPQFPHGS | SEQ ID NO:137 |
| 13 | GKEAPQFPHGSSASG | SEQ ID NO:138 |
| 14 | PQFPHGSSASGADAN | SEQ ID NO:139 |
| 15 | HGSSASGADANCSPR | SEQ ID NO:140 |
| 16 | ASGADANCSPRGPSC | SEQ ID NO:141 |
| 17 | DANCSPRGPSCGSAK | SEQ ID NO:142 |
| 18 | SPRGPSCGSAKELHA | SEQ ID NO:143 |
| 19 | PSCGSAKELHAVGQA | SEQ ID NO:144 |
| 20 | SAKELHAVGQAAERK | SEQ ID NO:145 |
| 21 | LHAVGQAAERKAERK | SEQ ID NO:146 |
| 22 | GQAAERKAERKQREA | SEQ ID NO:147 |
| 23 | ERKAERKQREALQGG | SEQ ID NO:148 |
| 24 | ERKQREALQGGDRGF | SEQ ID NO:149 |
| 25 | REALQGGDRGFAAPQ | SEQ ID NO:150 |
| 26 | QGGDRGFAAPQFSLW | SEQ ID NO:151 |
| 27 | RGFAAPQFSLWRRPV | SEQ ID NO:152 |
| 28 | APQFSLWRRPVVTAH | SEQ ID NO:153 |
| 29 | SLWRRPVVTAHIEGQ | SEQ ID NO:154 |
| 30 | RPVVTAHIEGQPVEV | SEQ ID NO:155 |
| 31 | TAHIEGQPVEVLLDT | SEQ ID NO:156 |
| 32 | EGQPVEVLLDTGADD | SEQ ID NO:157 |
| 33 | VEVLLDTGADDSIVT | SEQ ID NO:158 |
| 34 | LDTGADDSIVTGIEL | SEQ ID NO:159 |
| 35 | ADDSIVTGIELGPHY | SEQ ID NO:160 |
| 36 | IVTGIELGPHYTPKI | SEQ ID NO:161 |
| 37 | IELGPHYTPKIVGGI | SEQ ID NO:162 |
| 38 | PHYTPKIVGGIGGFI | SEQ ID NO:163 |
| 39 | PKIVGGIGGFINTKE | SEQ ID NO:164 |
| 40 | GGIGGFINTKEYKNV | SEQ ID NO:165 |
| 41 | GFINTKEYKNVEIEV | SEQ ID NO:166 |
| 42 | TKEYKNVEIEVLGKR | SEQ ID NO:167 |
| 43 | KNVEIEVLGKRIKGT | SEQ ID NO:168 |
| 44 | IEVLGKRIKGTIMTG | SEQ ID NO:169 |
| 45 | GKRIKGTIMTGDTPI | SEQ ID NO:170 |
| 46 | KGTIMTGDTPINIFG | SEQ ID NO:171 |
| 47 | MTGDTPINIFGRNLL | SEQ ID NO:172 |
| 48 | TPINIFGRNLLTALG | SEQ ID NO:173 |
| 49 | IFGRNLLTALGMSLN | SEQ ID NO:174 |
| 50 | NLLTALGMSLNFPIA | SEQ ID NO:175 |
| 51 | ALGMSLNEPIAKVEP | SEQ ID NO:176 |
| 52 | SLNFPIAKVEPVKVA | SEQ ID NO:177 |
| 53 | PIAKVEPVKVALKPG | SEQ ID NO:178 |
| 54 | VEPVKVALKPGKDGP | SEQ ID NO:179 |
| 55 | KVALKPGKDGPKLKQ | SEQ ID NO:180 |
| 56 | KPGKDGPKLKQWPLS | SEQ ID NO:181 |
| 57 | DGPKLKQWPLSKEKI | SEQ ID NO:182 |
| 58 | LKQWPLSKEKIVALR | SEQ ID NO:183 |
| 59 | PLSKEKIVALREICE | SEQ ID NO:184 |
| 60 | EKIVALREICEKMEK | SEQ ID NO:185 |
| 61 | ALREICEKMEKDGQL | SEQ ID NO:186 |
| 62 | ICEKMEKDGQLEEAP | SEQ ID NO:187 |
| 63 | MEKDGQLEEAPPTNP | SEQ ID NO:188 |
| 64 | GQLEEAPPTNPYNTP | SEQ ID NO:189 |
| 65 | EAPPTNPYNTPTFAI | SEQ ID NO:190 |
| 66 | TNPYNTPTFAIKKKD | SEQ ID NO:191 |
| 67 | NTPTFAIKKKDKNKW | SEQ ID NO:192 |
| 68 | FAIKKKDKNKWRMLI | SEQ ID NO:193 |
| 69 | KKDKNKWRMLIDFRE | SEQ ID NO:194 |
| 70 | NKWRMLIDFRELNRV | SEQ ID NO:195 |
| 71 | MLIDFRELNRVTQDF | SEQ ID NO:196 |
| 72 | FRELNRVTQDFTEVQ | SEQ ID NO:197 |
| 73 | NRVTQDFTEVQLGIP | SEQ ID NO:198 |
| 74 | QDFTEVQLGIPHPAG | SEQ ID NO:199 |
| 75 | EVQLGIPHPAGLAKR | SEQ ID NO:200 |
| 76 | GIPHPAGLAKRKRIT | SEQ ID NO:201 |
| 77 | PAGLAKRKRITVLDI | SEQ ID NO:202 |
| 78 | AKRKRITVLDIGDAY | SEQ ID NO:203 |
| 79 | RITVLDIGDAYFSIP | SEQ ID NO:204 |
| 80 | LDIGDAYFSIPLDEE | SEQ ID NO:205 |
| 81 | DAYFSIPLDEEFRQY | SEQ ID NO:206 |
| 82 | SIPLDEEFRQYTAFT | SEQ ID NO:207 |
| 83 | DEEFRQYTAFTLPSV | SEQ ID NO:208 |
| 84 | RQYTAFTLPSVNNAE | SEQ ID NO:209 |
| 85 | AFTLPSVNNAEPGKR | SEQ ID NO:210 |
| 86 | PSVNNAEPGKRYIYK | SEQ ID NO:211 |
| 87 | NAEPGKRYIYKVLPQ | SEQ ID NO:212 |
| 88 | GKRYIYKVLPQGWKG | SEQ ID NO:213 |
| 89 | IYKVLPQGWKGSPAI | SEQ ID NO:214 |
| 90 | LPQGWKGSPAIFQYT | SEQ ID NO:215 |
| 91 | WKGSPAIFQYTMRHV | SEQ ID NO:216 |
| 92 | PAIFQYTMRHVLEPF | SEQ ID NO:217 |
| 93 | QYTMRHVLEPFRKAN | SEQ ID NO:218 |
| 94 | RHVLEPFRKANPDVT | SEQ ID NO:219 |
| 95 | EPFRKANPDVTLVQY | SEQ ID NO:220 |
| 96 | KANPDVTLVQYMDDI | SEQ ID NO:221 |
| 97 | DVTLVQYMDDILIAS | SEQ ID NO:222 |
| 98 | VQYMDDILIASDRTD | SEQ ID NO:223 |
| 99 | DDILIASDRTDLEHD | SEQ ID NO:224 |
| 100 | IASDRTDLEHDRVVL | SEQ ID NO:225 |
| 101 | RTDLEHDRVVLQSKE | SEQ ID NO:226 |
| 102 | EHDRVVLQSKELLNS | SEQ ID NO:227 |
| 103 | VVLQSKELLNSIGFS | SEQ ID NO:228 |
| 104 | SKELLNSIGFSTPEE | SEQ ID NO:229 |
| 105 | LNSIGFSTPEEKFQK | SEQ ID NO:230 |
| 106 | GFSTPEEKFQKDPPF | SEQ ID NO:231 |
| 107 | PEEKFQKDPPFQWMG | SEQ ID NO:232 |
| 108 | FQKDPPFQWMGYELW | SEQ ID NO:233 |
| 109 | PPFQWMGYELWPTKW | SEQ ID NO:234 |
| 110 | WMGYELWPTKWKLQK | SEQ ID NO:235 |
| 111 | ELWPTKWKLQKIELP | SEQ ID NO:236 |
| 112 | TKWKLQKIELPQRET | SEQ ID NO:237 |
| 113 | LQKIELPQRETWTVN | SEQ ID NO:238 |
| 114 | ELPQRETWTVNDIQK | SEQ ID NO:239 |
| 115 | RETWTVNDIQKLVGV | SEQ ID NO:240 |
| 116 | TVNDIQKLVGVLNWA | SEQ ID NO:241 |
| 117 | IQKLVGVLNWAAQIY | SEQ ID NO:242 |
| 118 | VGVLNWAAQIYPGIK | SEQ ID NO:243 |
| 119 | NWAAQIYPGIKTKHL | SEQ ID NO:244 |
| 120 | QIYPGIKTKHLCRLI | SEQ ID NO:245 |
| 121 | GIKTKHLCRLIRGKM | SEQ ID NO:246 |
| 122 | KHLCRLIRGKMTLTE | SEQ ID NO:247 |
| 123 | RLIRGKMTLTEEVQW | SEQ ID NO:248 |
| 124 | GKMTLTEEVQWTEMA | SEQ ID NO:249 |
| 125 | LTEEVQWTEMAEAEY | SEQ ID NO:250 |
| 126 | VQWTEMAEAEYEENK | SEQ ID NO:251 |
| 127 | EMAEAEYEENKIILS | SEQ ID NO:252 |
| 128 | AEYEENKIILSQEQE | SEQ ID NO:253 |
| 129 | ENKIILSQEQEGCYY | SEQ ID NO:254 |
| 130 | ILSQEQEGCYYQEGK | SEQ ID NO:255 |
| 131 | EQEGCYYQEGKPLEA | SEQ ID NO:256 |
| 132 | CYYQEGKPLEATVIK | SEQ ID NO:257 |
| 133 | EGKPLEATVIKSQDN | SEQ ID NO:258 |
| 134 | LEATVIKSQDNQWSY | SEQ ID NO:259 |
| 135 | VIKSQDNQWSYKIHQ | SEQ ID NO:260 |
| 136 | QDNQWSYKIHQEDKI | SEQ ID NO:261 |
| 137 | WSYKIHQEDKILKVG | SEQ ID NO:262 |
| 138 | IHQEDKILKVGKFAK | SEQ ID NO:263 |
| 139 | DKILKVGKFAKIKNT | SEQ ID NO:264 |
| 140 | KVGKFAKIKNTHTNG | SEQ ID NO:265 |
| 141 | FAKIKNTHTNGVRLL | SEQ ID NO:266 |
| 142 | KNTHTNGVRLLAHVI | SEQ ID NO:267 |
| 143 | TNGVRLLAHVIQKIG | SEQ ID NO:268 |
| 144 | RLLAHVIQKIGKEAI | SEQ ID NO:269 |
| 145 | HVIQKIGKEAIVIWG | SEQ ID NO:270 |
| 146 | KIGKEAIVIWGQVPK | SEQ ID NO:271 |
| 147 | EAIVIWGQVPKFHLP | SEQ ID NO:272 |
| 148 | IWGQVPKFHLPVEKD | SEQ ID NO:273 |
| 149 | VPKFHLPVEKDVWEQ | SEQ ID NO:274 |
| 150 | HLPVEKDVWEQWWTD | SEQ ID NO:275 |
| 151 | EKDVWEQWWTDYWQV | SEQ ID NO:276 |
| 152 | WEQWWTDYWQVTWIP | SEQ ID NO:277 |
| 153 | WTDYWQVTWIPEWDF | SEQ ID NO:278 |
| 154 | WQVTWIPEWDFISTP | SEQ ID NO:279 |
| 155 | WIPEWDFISTPPLVR | SEQ ID NO:280 |
| 156 | WDFISTPPLVRLVFN | SEQ ID NO:281 |
| 157 | STPPLVRLVFNLVKD | SEQ ID NO:282 |
| 158 | LVRLVFNLVKDPIEG | SEQ ID NO:283 |
| 159 | VFNLVKDPIEGEETY | SEQ ID NO:284 |
| 160 | VKDPIEGEETYYTDG | SEQ ID NO:285 |
| 161 | IEGEETYYTDGSCNK | SEQ ID NO:286 |
| 162 | ETYYTDGSCNKQSKE | SEQ ID NO:287 |
| 163 | TDGSCNKQSKEGKAG | SEQ ID NO:288 |
| 164 | CNKQSKEGKAGYITD | SEQ ID NO:289 |
| 165 | SKEGKAGYITDRGKD | SEQ ID NO:290 |
| 166 | KAGYITDRGKDKVKV | SEQ ID NO:291 |
| 167 | ITDRGKDKVKVLEQT | SEQ ID NO:292 |
| 168 | GKDKVKVLEQTTNQQ | SEQ ID NO:293 |
| 169 | VKVLEQTTNQQAELE | SEQ ID NO:294 |
| 170 | EQTTNQQAELEAFLM | SEQ ID NO:295 |
| 171 | NQQAELEAFLMALTD | SEQ ID NO:296 |
| 172 | ELEAFLMALTDSGPK | SEQ ID NO:297 |
| 173 | FLMALTDSGPKANII | SEQ ID NO:298 |
| 174 | LTDSGPKANIIVDSQ | SEQ ID NO:299 |
| 175 | GPKANIIVDSQYVMG | SEQ ID NO:300 |
| 176 | NIIVDSQYVMGIITG | SEQ ID NO:301 |
| 177 | DSQYVMGIITGCPTE | SEQ ID NO:302 |
| 178 | VMGIITGCPTESESR | SEQ ID NO:303 |
| 179 | ITGCPTESESRLVNQ | SEQ ID NO:304 |
| 180 | PTESESRLVNQIIEE | SEQ ID NO:305 |
| 181 | ESRLVNQIIEEMIKK | SEQ ID NO:306 |
| 182 | VNQIIEEMIKKSEIY | SEQ ID NO:307 |
| 183 | IEEMIKKSEIYVAWV | SEQ ID NO:308 |
| 184 | IKKSEIYVAWVPAHK | SEQ ID NO:309 |
| 185 | EIYVAWVPAHKGIGG | SEQ ID NO:310 |
| 186 | AWVPAHKGIGGNQEI | SEQ ID NO:311 |
| 187 | AHKGIGGNQEIDELV | SEQ ID NO:312 |
| 188 | IGGNQEIDHLVSQGI | SEQ ID NO:313 |
| 189 | QEIDHLVSQGIRQVL | SEQ ID NO:314 |
| 190 | HLVSQGIRQVLFLEK | SEQ ID NO:315 |
| 191 | QGIRQVLFLEKIEPA | SEQ ID NO:316 |
| 192 | QVLFLEKIEPAQEEH | SEQ ID NO:317 |
| 193 | LEKIEPAQEEHDKYH | SEQ ID NO:318 |
| 194 | EPAQEEHDKYHSNVK | SEQ ID NO:319 |
| 195 | EEHDKYHSNVKELVF | SEQ ID NO:320 |
| 196 | KYHSNVKELVFKFGL | SEQ ID NO:321 |
| 197 | NVKELVFKFGLPRIV | SEQ ID NO:322 |
| 198 | LVFKFGLPRIVARQI | SEQ ID NO:323 |
| 199 | FGLPRIVARQIVDTC | SEQ ID NO:324 |
| 200 | RIVARQIVDTCDKCH | SEQ ID NO:325 |
| 201 | RQIVDTCDKCHQKGE | SEQ ID NO:326 |
| 202 | DTCDKCHQKGEAIHG | SEQ ID NO:327 |
| 203 | KCHQKGEAIHGQANS | SEQ ID NO:328 |
| 204 | KGEAIHGQANSDLGT | SEQ ID NO:329 |
| 205 | IHGQANSDLGTWQMD | SEQ ID NO:330 |
| 206 | ANSDLGTWQMDCTHL | SEQ ID NO:331 |
| 207 | LGTWQMDCTHLEGKI | SEQ ID NO:332 |
| 208 | QMDCTHLEGKIIIVA | SEQ ID NO:333 |
| 209 | THLEGKIIIVAVHVA | SEQ ID NO:334 |
| 210 | GKIIIVAVHVASGFI | SEQ ID NO:335 |
| 211 | IVAVHVASGFIEAEV | SEQ ID NO:336 |
| 212 | HVASGFIEAEVIPQE | SEQ ID NO:337 |
| 213 | GFIEAEVIPQETGRQ | SEQ ID NO:338 |
| 214 | AEVIPQETGRQTALF | SEQ ID NO:339 |
| 215 | PQETGRQTALFLLKL | SEQ ID NO:340 |
| 216 | GRQTALFLLKLAGRW | SEQ ID NO:341 |
| 217 | ALFLLKLAGRWPITH | SEQ ID NO:342 |
| 218 | LKLAGRWPITHLHTD | SEQ ID NO:343 |
| 219 | GRWPITHLHTDNGAN | SEQ ID NO:344 |
| 220 | ITHLHTDNGANFASQ | SEQ ID NO:345 |
| 221 | HTDNGANFASQEVKM | SEQ ID NO:346 |
| 222 | GANFASQEVKMVAWW | SEQ ID NO:347 |
| 223 | ASQEVKMVAWWAGIE | SEQ ID NO:348 |
| 224 | VKMVAWWAGIEHTFG | SEQ ID NO:349 |
| 225 | AWWAGIEHTFGVPYN | SEQ ID NO:350 |
| 226 | GIEHTFGVPYNPQSQ | SEQ ID N0:351 |
| 227 | TFGVPYNPQSQGVVE | SEQ ID NO:352 |
| 228 | PYNPQSQGVVEAMNH | SEQ ID NO:353 |
| 229 | QSQGVVEAMNHHLKN | SEQ ID NO:354 |
| 230 | VVEAMNHHLKNQIDR | SEQ ID NO:355 |
| 231 | MNHHLKNQIDRIREQ | SEQ ID NO:356 |
| 232 | LKNQIDRIREQANSV | SEQ ID NO:357 |
| 233 | IDRIREQANSVETIV | SEQ ID NO:358 |
| 234 | REQANSVETIVLMAV | SEQ ID NO:359 |
| 235 | NSVETIVLMAVHCMN | SEQ ID NO:360 |
| 236 | TIVLMAVHCMNFKRR | SEQ ID NO:361 |
| 237 | MAVHCMNFKRRGGIG | SEQ ID NO:362 |
| 238 | CMNFKRRGGIGDMTP | SEQ ID NO:363 |
| 239 | KRRGGIGDMTPAERL | SEQ ID NO:364 |
| 240 | GIGDMTPAERLINMI | SEQ ID NO:365 |
| 241 | MTPAERLINMITTEQ | SEQ ID NO:366 |
| 242 | ERLINMITTEQEIQF | SEQ ID NO:367 |
| 243 | NMITTEQEIQFQQSK | SEQ ID NO:368 |
| 244 | TEQEIQFQQSKNSKF | SEQ ID NO:369 |
| 245 | IQFQQSKNSKFKNFR | SEQ ID NO:370 |
| 246 | QSKNSKFKNFRVYYR | SEQ ID NO:371 |
| 247 | SKFKNFRVYYREGRD | SEQ ID NO:372 |
| 248 | NFRVYYREGRDQLWK | SEQ ID NO:373 |
| 249 | YYREGRDQLWKGPGE | SEQ ID NO:374 |
| 250 | GRDQLWKGPGELLWK | SEQ ID NO:375 |
| 251 | LWKGPGELLWKGEGA | SEQ ID NO:376 |
| 252 | PGELLWKGEGAVILK | SEQ ID NO:377 |
| 253 | LWKGEGAVILKVGTD | SEQ ID NO:378 |
| 254 | EGAVILKVGTDIKVV | SEQ ID NO:379 |
| 255 | ILKVGTDIKVVPRRK | SEQ ID NO:380 |
| 256 | GTDIKVVPRRKAKII | SEQ ID NO:381 |
| 257 | KVVPRRKAKIIKDYG | SEQ ID NO:382 |
| 258 | RRKAKIIKDYGGGKE | SEQ ID NO:383 |
| 259 | KIIKDYGGGKEVDSS | SEQ ID NO:384 |
| 260 | DYGGGKEVDSSSHME | SEQ ID NO:385 |
| 261 | GKEVDSSSHMEDTGE | SEQ ID NO:386 |
| 262 | DSSSHMEDTGEAREV | SEQ ID NO:387 |
| 263 | HMEDTGEAREVA | SEQ ID NO:388 |

[0188] TABLE 3

One embodiment of an SIV_{mac236} nef peptide pool
sequence. Each peptide is 15 amino acids in
length and overlaps the preceding peptide by 11
amino acids. The full-length nef sequence [SEQ
ID NO:2186] is modified from the HIV sequence
database http://hiv-web.lanl.gov.

| | | |
|---|---|---|
| # | PEPTIDE | SEQUENCE ID |

| | | |
|---|---|---|
| 1 | MGGAISMRRSRPSGD | SEQ ID NO:389 |
| 2 | ISMRRSRPSGDLRQR | SEQ ID NO:390 |
| 3 | RSRPSGDLRQRLLRA | SEQ ID NO:391 |
| 4 | SGDLRQRLLRARGET | SEQ ID NO:392 |
| 5 | RQRLLRARGETYGRL | SEQ ID NO:393 |
| 6 | LRARGETYGRLLGEV | SEQ ID NO:394 |
| 7 | GETYGRLLGEVEDGY | SEQ ID NO:395 |
| 8 | GRLLGEVEDGYSQSP | SEQ ID NO:396 |
| 9 | GEVEDGYSQSPGGLD | SEQ ID NO:397 |
| 10 | DGYSQSPGGLDKGLS | SEQ ID NO:398 |
| 11 | QSPGGLDKGLSSLSC | SEQ ID NO:399 |
| 12 | GLDKGLSSLSCEGQK | SEQ ID NO:400 |
| 13 | GLSSLSCEGQKYNQG | SEQ ID NO:401 |
| 14 | LSCEGQKYNQGQYMN | SEQ ID NO:402 |
| 15 | GQKYNQGQYMNTPWR | SEQ ID NO:403 |
| 16 | NQGQYMNTPWRNPAE | SEQ ID NO:404 |
| 17 | YMNTPWRNPAEEREK | SEQ ID NO:405 |
| 18 | PWRNPAEEREKLAYR | SEQ ID NO:406 |
| 19 | PAEEREKLAYRKQNM | SEQ ID NO:407 |
| 20 | REKLAYRKQNMDDID | SEQ ID NO:408 |
| 21 | AYRKQNMDDIDE | SEQ ID NO:409 |

[0189] TABLE 4

One embodiment of an SHIV_{SF162P3} env peptide pool
sequence. Each peptide is 15 amino acids in
length and overlaps the preceding peptide by 11
amino acids. Peptide 211 is 14 amino acids in
length. *Peptide overlaps preceding peptide by 10
amino acids to eliminate a forbidden Q n-terminal
peptide. The full-length env sequence [SEQ ID
NO:2187] is modified from the HIV sequence
database http://hiv-web.lanl.gov.

| | | |
|---|---|---|
| # | PEPTIDE | SEQUENCE ID |

| | | |
|---|---|---|
| 1 | MRVKGIRKNYQHLWR | SEQ ID NO:410 |
| 2 | GIRKNYQHLWRGGTL | SEQ ID NO:411 |
| 3 | NYQHLWRGGTLLLGM | SEQ ID NO:412 |
| 4 | LWRGGTLLLGMLMIC | SEQ ID NO:413 |
| 5 | GTLLLGMLMICSAVE | SEQ ID NO:414 |
| 6 | LGMLMICSAVEKLWV | SEQ ID NO:415 |
| 7 | MICSAVEKLWVTVYY | SEQ ID NO:416 |
| 8 | AVEKLWVTVYYGVPA | SEQ ID NO:417 |
| 9 | LWVTVYYGVPAWKEA | SEQ ID NO:418 |
| 10 | VYYGVPAWKEATTTL | SEQ ID NO:419 |
| 11 | VPAWKEATTTLFCAS | SEQ ID NO:420 |
| 12 | KEATTTLFCASDAKA | SEQ ID NO:421 |
| 13 | TTLFCASDAKAYDTE | SEQ ID NO:422 |
| 14 | CASDAKAYDTEVHNV | SEQ ID NO:423 |
| 15 | AKAYDTEVHNVWATH | SEQ ID NO:424 |
| 16 | DTEVHNVWATHACVP | SEQ ID NO:425 |
| 17 | HNVWATHACVPTDPN | SEQ ID NO:426 |
| 18 | ATHACVPTDPNPQEI | SEQ ID NO:427 |
| 19 | CVPTDPNPQEIVLEN | SEQ ID NO:428 |
| 20 | DPNPQEIVLENVTEN | SEQ ID NO:429 |
| 21 | PQEIVLENVTENFNM* | SEQ ID NO:430 |
| 22 | VLENVTENFNMWKNN | SEQ ID NO:431 |
| 23 | VTENFNMWKNNMVEQ | SEQ ID NO:432 |
| 24 | FNMWKNNMVEQMHED | SEQ ID NO:433 |
| 25 | KNNMVEQMHEDIISL | SEQ ID NO:434 |
| 26 | VEQMHEDIISLWDQS | SEQ ID NO:435 |
| 27 | HEDIISLNDQSLEPC | SEQ ID NO:436 |
| 28 | ISLWDQSLEPCVKLT | SEQ ID NO:437 |
| 29 | DQSLEPCVKLTPLCV | SEQ ID NO:438 |
| 30 | EPCVKLTPLCVTLHC | SEQ ID NO:439 |
| 31 | KLTPLCVTLHCTNLE | SEQ ID NO:440 |
| 32 | LCVTLHCTNLENATN | SEQ ID NO:441 |
| 33 | LHCTNLENATNTTSS | SEQ ID NO:442 |
| 34 | NLENATNTTSSNWKE | SEQ ID NO:443 |
| 35 | ATNTTSSNWKEMNRG | SEQ ID NO:444 |
| 36 | TSSNWKEMNRGEIKN | SEQ ID NO:445 |
| 37 | WKEMNRGEIKNCSFN | SEQ ID NO:446 |
| 38 | NRGEIKNCSFNVTTS | SEQ ID NO:447 |
| 39 | IKNCSFNVTTSIGNK | SEQ ID NO:448 |
| 40 | SFNVTTSIGNKMQKE | SEQ ID NO:449 |
| 41 | TTSIGNKMQKEYALF | SEQ ID NO:450 |
| 42 | GNKMQKEYALFYRLD | SEQ ID NO:451 |
| 43 | MQKEYALFYRLDVVP* | SEQ ID NO:452 |
| 44 | YALFYRLDVVPIDND | SEQ ID NO:453 |
| 45 | YRLDVVPIDNDNTSY | SEQ ID NO:454 |
| 46 | VVPIDNDNTSYNLIN | SEQ ID NO:455 |
| 47 | DNDNTSYNLINCNTS | SEQ ID NO:456 |
| 48 | TSYNLINCNTSVITQ | SEQ ID NO:457 |
| 49 | LINCNTSVITQACPK | SEQ ID NO:458 |
| 50 | NTSVITQACPKVSFE | SEQ ID NO:459 |
| 51 | ITQACPKVSFEPIPI | SEQ ID NO:460 |
| 52 | CPKVSFEPIPIHYCA | SEQ ID NO:461 |
| 53 | SFEPIPIHYCAPAGF | SEQ ID NO:462 |
| 54 | IPIHYCAPAGFAILK | SEQ ID NO:463 |
| 55 | YCAPAGFAILKCNDK | SEQ ID NO:464 |
| 56 | AGFAILKCNDKKFNG | SEQ ID NO:465 |
| 57 | ILKCNDKKFNGSGPC | SEQ ID NO:466 |
| 58 | NDKKFNGSGPCINVS | SEQ ID NO:467 |
| 59 | FNGSGPCINVSTVQC | SEQ ID NO:468 |
| 60 | GPCINVSTVQCTHGI | SEQ ID NO:469 |
| 61 | NVSTVQCTHGIRPVV | SEQ ID NO:470 |
| 62 | VQCTHGIRPVVSTQL | SEQ ID NO:471 |
| 63 | HGIRPVVSTQLLLNG | SEQ ID NO:472 |
| 64 | PVVSTQLLLNGSLAE | SEQ ID NO:473 |
| 65 | TQLLLNGSLAEEGVV | SEQ ID NO:474 |
| 66 | LNGSLAEEGVVIRSE | SEQ ID NO:475 |
| 67 | LAEEGVVIRSENFTD | SEQ ID NO:476 |
| 68 | GVVIRSENFTDNVKT | SEQ ID NO:477 |
| 69 | RSENFTDNVKTIIVQ | SEQ ID NO:478 |
| 70 | FTDNVKTIIVQLKES | SEQ ID NO:479 |
| 71 | VKTIIVQLKESVEIN | SEQ ID NO:480 |
| 72 | IVQLKESVEINCTRP | SEQ ID NO:481 |
| 73 | KESVEINCTRPNNNT | SEQ ID NO:482 |
| 74 | EINCTRPNNNTRKSI | SEQ ID NO:483 |
| 75 | TRPNNNTRKSIPIGP | SEQ ID NO:484 |
| 76 | NNTRKSIPIGPGKAF | SEQ ID NO:485 |
| 77 | KSIPIGPGKAFYATG | SEQ ID NO:486 |
| 78 | IGPGKAFYATGDIIG | SEQ ID NO:487 |
| 79 | KAFYATGDIIGDIRQ | SEQ ID NO:488 |
| 80 | ATGDIIGDIRQAHCN | SEQ ID NO:489 |
| 81 | IIGDIRQAHCNISGE | SEQ ID NO:490 |
| 82 | IRQAHCNISGEKWNN | SEQ ID NO:491 |
| 83 | HCNISGEKWNNTLKQ | SEQ ID NO:492 |
| 84 | SGEKWNNTLKQIVTK | SEQ ID NO:493 |
| 85 | WNNTLKQIVTKLQAQ | SEQ ID NO:494 |
| 86 | LKQIVTKLQAQFENK | SEQ ID NO:495 |
| 87 | VTKLQAQFENKTIVF | SEQ ID NO:496 |
| 88 | LQAQFENKTIVFKQS* | SEQ ID NO:497 |
| 89 | FENKTIVFKQSSGGD | SEQ ID NO:498 |
| 90 | TIVFKQSSGGDPEIV | SEQ ID NO:499 |
| 91 | KQSSGGDPEIVMHSF | SEQ ID NO:500 |
| 92 | GGDPEIVMHSFNCGG | SEQ ID NO:501 |
| 93 | EIVMHSFNCGGEFFY | SEQ ID NO:502 |
| 94 | HSFNCGGEFFYCNST | SEQ ID NO:503 |
| 95 | CGGEFFYCNSTQLFN | SEQ ID NO:504 |
| 96 | FFYCNSTQLFNSTWN | SEQ ID NO:505 |
| 97 | NSTQLFNSTWNNTIG | SEQ ID NO:506 |
| 98 | LFNSTWNNTIGPNNT | SEQ ID NO:507 |
| 99 | TWNNTIGPNNTNGTI | SEQ ID NO:508 |
| 100 | TIGPNNTNGTITLPC | SEQ ID NO:509 |
| 101 | NNTNGTITLPCRIKQ | SEQ ID NO:510 |
| 102 | GTITLPCRIKQIINR | SEQ ID NO:511 |
| 103 | LPCRIKQIINRWQEV | SEQ ID NO:512 |
| 104 | IKQIINRWQEVGKAM | SEQ ID NO:513 |
| 105 | INRWQEVGKAMYAPP | SEQ ID NO:514 |
| 106 | WQEVGKAMYAPPIRG* | SEQ ID NO:515 |
| 107 | GKAMYAPPIRGQIRC | SEQ ID NO:516 |
| 108 | YAPPIRGQIRCSSNI | SEQ ID NO:517 |
| 109 | IRGQIRCSSNITGLL | SEQ ID NO:518 |
| 110 | IRCSSNITGLLLTRD | SEQ ID NO:519 |
| 111 | SNITGLLLTRDGGRE | SEQ ID NO:520 |
| 112 | GLLLTRDGGREVGNT | SEQ ID NO:521 |
| 113 | TRDGGREVGNTTEIF | SEQ ID NO:522 |
| 114 | GREVGNTTEIFRPGG | SEQ ID NO:523 |
| 115 | GNTTEIFRPGGGDMR | SEQ ID NO:524 |
| 116 | EIFRPGGGDMRDNWR | SEQ ID NO:525 |
| 117 | PGGGDMRDNWRSELY | SEQ ID NO:526 |
| 118 | DMRDNWRSELYKYKV | SEQ ID NO:527 |
| 119 | NWRSELYKYKVVKIE | SEQ ID NO:528 |
| 120 | ELYKYKVVKIEPLGV | SEQ ID NO:529 |
| 121 | YKVVKIEPLGVAPTK | SEQ ID NO:530 |
| 122 | KIEPLGVAPTKAKRR | SEQ ID NO:531 |
| 123 | LGVAPTKAKRRVVQR | SEQ ID NO:532 |
| 124 | PTKAKRRVVQREKRA | SEQ ID NO:533 |
| 125 | KRRVVQREKRAVTLG | SEQ ID NO:534 |
| 126 | VQREKRAVTLGAVFL | SEQ ID NO:535 |
| 127 | KRAVTLGAVFLGFLG | SEQ ID NO:536 |
| 128 | TLGAVFLGFLGAAGS | SEQ ID NO:537 |
| 129 | VFLGFLGAAGSTMGA | SEQ ID NO:538 |
| 130 | FLGAAGSTMGAASLT | SEQ ID NO:539 |
| 131 | AGSTMGAASLTLTVQ | SEQ ID NO:540 |
| 132 | MGAASLTLTVQARQL | SEQ ID NO:541 |
| 133 | SLTLTVQARQLLSGI | SEQ ID NO:542 |
| 134 | TVQARQLLSGIVQQQ | SEQ ID NO:543 |
| 135 | RQLLSGIVQQQNNLL | SEQ ID NO:544 |
| 136 | SGIVQQQNNLLRAIE | SEQ ID NO:545 |
| 137 | VQQQNNLLRAIEAQQ* | SEQ ID NO:546 |
| 138 | NNLLRAIEAQQRLLQ | SEQ ID NO:547 |
| 139 | RAIEAQQRLLQLTVW | SEQ ID NO:548 |
| 140 | AQQRLLQLTVWGIKQ | SEQ ID NO:549 |
| 141 | LLQLTVWGIKQLQAR | SEQ ID NO:550 |
| 142 | TVWGIKQLQARVLAV | SEQ ID NO:551 |
| 143 | IKQLQARVLAVERYL | SEQ ID NO:552 |
| 144 | LQARVLAVERYLKDQ* | SEQ ID NO:553 |
| 145 | VLAVERYLKDQQLLG | SEQ ID NO:554 |
| 146 | ERYLKDQQLLGIWGC | SEQ ID NO:555 |
| 147 | KDQQLLGIWGCSGKL | SEQ ID NO:556 |
| 148 | LLGIWGCSGKLICTT | SEQ ID NO:557 |
| 149 | WGCSGKLICTTAVPW | SEQ ID NO:558 |
| 150 | GKLICTTAVPWNASW | SEQ ID NO:559 |
| 151 | CTTAVPWNASWSNKS | SEQ ID NO:560 |
| 152 | VPWNASWSNKSLDQI | SEQ ID NO:561 |
| 153 | ASWSNKSLDQIWNNM | SEQ ID NO:562 |
| 154 | NKSLDQIWNNMTWME | SEQ ID NO:563 |
| 155 | DQIWNNMTWMEWERE | SEQ ID NO:564 |
| 156 | NNMTWMEWEREIGNY | SEQ ID NO:565 |
| 157 | WMEWEREIGNYTNLI | SEQ ID NO:566 |
| 158 | EREIGNYTNLIYTLI | SEQ ID NO:567 |
| 159 | GNYTNLIYTLIEESQ | SEQ ID NO:568 |
| 160 | NLIYTLIEESQNQQE | SEQ ID NO:569 |
| 161 | TLIEESQNQQEKNEQ | SEQ ID NO:570 |
| 162 | ESQNQQEKNEQELLE | SEQ ID NO:571 |
| 163 | NQQEKNEQELLELDK* | SEQ ID NO:572 |
| 164 | KNEQELLELDKWASL | SEQ ID NO:573 |
| 165 | ELLELDKWASLWNWL | SEQ ID NO:574 |
| 166 | LDKWASLWNWLDISK | SEQ ID NO:575 |
| 167 | ASLWNWLDISKWLWY | SEQ ID NO:576 |
| 168 | NWLDISKWLWYIKIF | SEQ ID NO:577 |
| 169 | ISKWLWYIKIFIMIV | SEQ ID NO:578 |
| 170 | LWYIKIFIMIVGGLV | SEQ ID NO:579 |
| 171 | KIFIMIVGGLVGLRI | SEQ ID NO:580 |
| 172 | MIVGGLVGLRIVFTV | SEQ ID NO:581 |
| 173 | GLVGLRIVFTVLSIV | SEQ ID NO:582 |
| 174 | LRIVFTVLSIVNRVR | SEQ ID NO:583 |
| 175 | FTVLSIVNRVRQGYS | SEQ ID NO:584 |
| 176 | SIVNRVRQGYSPLSF | SEQ ID NO:585 |
| 177 | RVRQGYSPLSFQTRF | SEQ ID NO:586 |
| 178 | GYSPLSFQTRFPAPR | SEQ ID NO:587 |
| 179 | LSFQTRFPAPRGLDR | SEQ ID NO:588 |
| 180 | TRFPAPRGLDRPEGI | SEQ ID NO:589 |
| 181 | APRGLDRPEGIEEEG | SEQ ID NO:590 |
| 182 | LDRPEGIEEEGGERD | SEQ ID NO:591 |
| 183 | EGIEEEGGERDRDRS | SEQ ID NO:592 |
| 184 | EEGGERDRDRSRPLV | SEQ ID NO:593 |
| 185 | ERDRDRSRPLVHGLL | SEQ ID NO:594 |
| 186 | DRSRPLVHGLLALIW | SEQ ID NO:595 |
| 187 | PLVHGLLALIWDDLR | SEQ ID NO:596 |
| 188 | GLLALIWDDLRSLCL | SEQ ID NO:597 |
| 189 | LIWDDLRSLCLFSYH | SEQ ID NO:598 |
| 190 | DLRSLCLFSYHRLRD | SEQ ID NO:599 |
| 191 | LCLFSYHRLRDLILI | SEQ ID NO:600 |
| 192 | SYHRLRDLILIAARI | SEQ ID NO:601 |
| 193 | LRDLILIAARIVELL | SEQ ID NO:602 |
| 194 | ILIAARIVELLGRRG | SEQ ID NO:603 |
| 195 | ARIVELLGRRGWEAL | SEQ ID NO:604 |
| 196 | ELLGRRGWEALKYWG | SEQ ID NO:605 |
| 197 | RRGWEALKYWGNLLQ | SEQ ID NO:606 |
| 198 | EALKYWGNLLQYWIQ | SEQ ID NO:607 |
| 199 | YWGNLLQYWIQELKN | SEQ ID NO:608 |
| 200 | LLQYWIQELKNSAVS | SEQ ID NO:609 |
| 201 | WIQELKNSAVSLFGA | SEQ ID NO:610 |
| 202 | LKNSAVSLFGAIAIA | SEQ ID NO:611 |
| 203 | AVSLFGAIAIAVAEG | SEQ ID NO:612 |
| 204 | FGAIAIAVAEGTDRI | SEQ ID NO:613 |
| 205 | AIAVAEGTDRIIEVA | SEQ ID NO:614 |
| 206 | AEGTDRIIEVAQRIG | SEQ ID NO:615 |
| 207 | DRIIEVAQRIGRAFL | SEQ ID NO:616 |
| 208 | EVAQRIGRAFLHIPR | SEQ ID NO:617 |
| 209 | RIGRAFLHIPRRIRQ | SEQ ID NO:618 |
| 210 | AFLHIPRRIRQGLER | SEQ ID NO:619 |
| 211 | IPRRIRQGLERTLL | SEQ ID NO:620 |

[0190] TABLE 5

One embodiment of an HIV-1 consensus B clade
Gag peptide pool sequence. Each peptide is
15 amino acids in length and overlaps tile
preceding peptide by 11 amino acids. Peptide
124 is 12 amino acids in length. The
full-length Gag sequence [SEQ ID NO:2188] is
modified from the HIV sequence database.

| | | |
|---|---|---|
| # | PEPTIDE | SEQUENCE ID |

| | | |
|---|---|---|
| 1 | MGARASVLSGGELDR | SEQ ID NO:621 |
| 2 | ASVLSGGELDRWEKI | SEQ ID NO:622 |
| 3 | SGGELDRWEKIRLRP | SEQ ID NO:623 |
| 4 | LDRWEKIRLRPGGKK | SEQ ID NO:624 |
| 5 | EKIRLRPGGKKKYKL | SEQ ID NO:625 |
| 6 | LRPGGKKKYKLKHIV | SEQ ID NO:626 |
| 7 | GKKKYKLKHIVWASR | SEQ ID NO:627 |
| 8 | YKLKHIVWASRELER | SEQ ID NO:628 |
| 9 | HIVWASRELERFAVN | SEQ ID NO:629 |
| 10 | ASRELERFAVNPGLL | SEQ ID NO:630 |
| 11 | ELERFAVNPGLLETS | SEQ ID NO:631 |
| 12 | FAVNPGLLETSEGCR | SEQ ID NO:632 |
| 13 | PGLLETSEGCRQILG | SEQ ID NO:633 |
| 14 | ETSEGCRQILGQLQP | SEQ ID NO:634 |
| 15 | GCRQILGQLQPSLQT | SEQ ID NO:635 |
| 16 | ILGQLQPSLQTGSEE | SEQ ID NO:636 |
| 17 | LQPSLQTGSEELRSL | SEQ ID NO:637 |
| 18 | LQTGSEELRSLYNTV | SEQ ID NO:638 |
| 19 | SEELRSLYNTVATLY | SEQ ID NO:639 |
| 20 | RSLYNTVATLYCVHQ | SEQ ID NO:640 |
| 21 | NTVATLYCVHQRIEV | SEQ ID NO:641 |
| 22 | TLYCVHQRIEVKDTK | SEQ ID NO:642 |
| 23 | VHQRIEVKDTKEALE | SEQ ID NO:643 |
| 24 | IEVKDTKEALEKIEE | SEQ ID NO:644 |
| 25 | DTKEALEKIEEEQNK | SEQ ID NO:645 |
| 26 | ALEKIEEEQNKSKKK | SEQ ID NO:646 |
| 27 | IEEEQNKSKKKAQQA | SEQ ID NO:647 |
| 28 | QNKSKKKAQQAAADT | SEQ ID NO:648 |
| 29 | KKKAQQAAADTGNSS | SEQ ID NO:649 |
| 30 | QQAAADTGNSSQVSQ | SEQ ID NO:650 |
| 31 | ADTGNSSQVSQNYPI | SEQ ID NO:651 |
| 32 | NSSQVSQNYPIVQNL | SEQ ID NO:652 |
| 33 | VSQNYPIVQNLQGQM | SEQ ID NO:653 |
| 34 | YPIVQNLQGQMVHQA | SEQ ID NO:654 |
| 35 | QNLQGQMVHQAISPR | SEQ ID NO:655 |
| 36 | GQMVHQAISPRTLNA | SEQ ID NO:656 |
| 37 | HQAISPRTLNAWVKV | SEQ ID NO:657 |
| 38 | SPRTLNAWVKVVEEK | SEQ ID NO:658 |
| 39 | LNAWVKVVEEKAFSP | SEQ ID NO:659 |
| 40 | VKVVEEKAFSPEVIP | SEQ ID NO:660 |
| 41 | EEKAFSPEVIPMFSA | SEQ ID NO:661 |
| 42 | FSPEVIPMFSALSEG | SEQ ID NO:662 |
| 43 | VIPMFSALSEGATPQ | SEQ ID NO:663 |
| 44 | FSALSEGATPQDLNT | SEQ ID NO:664 |
| 45 | SEGATPQDLNTMLNT | SEQ ID NO:665 |
| 46 | TPQDLNTMLNTVGGH | SEQ ID NO:666 |
| 47 | LNTMLNTVGGHQAAM | SEQ ID NO:667 |
| 48 | LNTVGGHQAAMQMLK | SEQ ID NO:668 |
| 49 | GGHQAAMQMLKETIN | SEQ ID NO:669 |
| 50 | AAMQMLKETINEEAA | SEQ ID NO:670 |
| 51 | QMLKETINEEAAEWD | SEQ ID NO:671 |
| 52 | ETINEEAAEWDRLHP | SEQ ID NO:672 |
| 53 | EEAAEWDRLRPVHAG | SEQ ID NO:673 |
| 54 | EWDRLHPVHAGPIAP | SEQ ID NO:674 |
| 55 | LHPVHAGPIAPGQMR | SEQ ID NO:675 |
| 56 | HAGPIAPGQMREPRG | SEQ ID NO:676 |
| 57 | IAPGQMREPRGSDIA | SEQ ID NO:677 |
| 58 | QMREPRGSDIAGTTS | SEQ ID NO:678 |
| 59 | PRGSDIAGTTSTLQE | SEQ ID NO:679 |
| 60 | DIAGTTSTLQEQIGW | SEQ ID NO:680 |
| 61 | TTSTLQEQIGWMTNN | SEQ ID NO:681 |
| 62 | LQEQIGWMTNNPPIP | SEQ ID NO:682 |
| 63 | IGWMTNNPPIPVGEI | SEQ ID NO:683 |
| 64 | TNNPPIPVGEIYKRW | SEQ ID NO:684 |
| 65 | PIPVGEIYKRWIILG | SEQ ID NO:685 |
| 66 | GEIYKRWIILGLNKI | SEQ ID NO:686 |
| 67 | KRWIILGLNKIVRMY | SEQ ID NO:687 |
| 68 | ILGLNKIVRMYSPTS | SEQ ID NO:688 |
| 69 | NKIVRMYSPTSILDI | SEQ ID NO:689 |
| 70 | RMYSPTSILDIRQGP | SEQ ID NO:690 |
| 71 | PTSILDIRQGPKEPF | SEQ ID NO:691 |
| 72 | LDIRQGPKEPFRDYV | SEQ ID NO:692 |
| 73 | QGPKEPFRDYVDRFY | SEQ ID NO:693 |
| 74 | EPFRDYVDRFYKTLR | SEQ ID NO:694 |
| 75 | DYVDRFYKTLRAEQA | SEQ ID NO:695 |
| 76 | RFYKTLRAEQASQEV | SEQ ID NO:696 |
| 77 | TLRAEQASQEVKNWM | SEQ ID NO:697 |
| 78 | EQASQEVKNWMTETL | SEQ ID NO:698 |
| 79 | QEVKNWMTETLLVQN | SEQ ID NO:699 |
| 80 | NWMTETLLVQNANPD | SEQ ID NO:700 |
| 81 | ETLLVQNANPDCKTI | SEQ ID NO:701 |
| 82 | VQNANPDCKTILKAL | SEQ ID NO:702 |
| 83 | NPDCKTILKALGPAA | SEQ ID NO:703 |
| 84 | KTILKALGPAATLEE | SEQ ID NO:704 |
| 85 | KALGPAATLEEMMTA | SEQ ID NO:705 |
| 86 | PAATLEEMMTACQGV | SEQ ID NO:706 |
| 87 | LEEMMTACQGVGGPG | SEQ ID NO:707 |
| 88 | MTACQGVGGPGHKAR | SEQ ID NO:708 |
| 89 | QGVGGPGHKARVLAE | SEQ ID NO:709 |
| 90 | GPGHKARVLAEAMSQ | SEQ ID NO:710 |
| 91 | KARVLAEAMSQVTNS | SEQ ID NO:711 |
| 92 | LAEAMSQVTNSATIM | SEQ ID NO:712 |
| 93 | MSQVTNSATIMMQRG | SEQ ID NO:713 |
| 94 | TNSATIMMQRGNFRN | SEQ ID NO:714 |
| 95 | TIMMQRGNFRNQRKT | SEQ ID NO:715 |
| 96 | QRGNFRNQRKTVKCF | SEQ ID NO:716 |
| 97 | FRNQRKTVKCFNCGK | SEQ ID NO:717 |
| 98 | RKTVKCFNCGKEGHI | SEQ ID NO:718 |
| 99 | VKCFNCGKEGHIAKN | SEQ ID NO:719 |
| 100 | NCGKEGHIAKNCRAP | SEQ ID NO:720 |
| 101 | EGHIAKNCRAPRKKG | SEQ ID NO:721 |
| 102 | AKNCRAPRKKGCWKC | SEQ ID NO:722 |
| 103 | RAPRKKGCWKCGKEG | SEQ ID NO:723 |
| 104 | KKGCWKCGKEGHQMK | SEQ ID NO:724 |
| 105 | WKCGKEGHQMKDCTE | SEQ ID NO:725 |
| 106 | KEGHQMKDCTERQAN | SEQ ID NO:726 |
| 107 | QMKDCTERQANFLGK | SEQ ID NO:727 |
| 108 | CTERQANFLGKIWPS | SEQ ID NO:728 |
| 109 | QANFLGKIWPSHKGR | SEQ ID NO:729 |
| 110 | LGKIWPSHKGRPGNF | SEQ ID NO:730 |
| 111 | WPSHKGRPGNFLQSR | SEQ ID NO:731 |
| 112 | KGRPGNFLQSRPEPT | SEQ ID NO:732 |
| 113 | GNFLQSRPEPTAPPE | SEQ ID NO:733 |
| 114 | QSRPEPTAPPEESFR | SEQ ID NO:734 |
| 115 | EPTAPPEESFRFGEE | SEQ ID NO:735 |
| 116 | PPEESFRFGEETTTP | SEQ ID NO:736 |
| 117 | SFRFGEETTTPSQKQ | SEQ ID NO:737 |
| 118 | GEETTTPSQKQEPID | SEQ ID NO:738 |
| 119 | TTTPSQKQEPIDKEL | SEQ ID NO:739 |
| 120 | SQKQEPIDKELYPLA | SEQ ID NO:740 |
| 121 | EPIDKELYPLASLRS | SEQ ID NO:741 |
| 122 | KELYPLASLRSLFGN | SEQ ID NO:742 |
| 123 | PLASLRSLFGNDPSS | SEQ ID NO:743 |
| 124 | LRSLFGNDPSSQ | SEQ ID NO:744 |

[0191] TABLE 6

One embodiment of an HIV-1 consensus B clade
Nef peptide pool sequence. Each peptide is 15
amino acids in length and overlaps the
preceding peptide by 11 amino acids. Peptide 49
is 14 amino acids in length. The fill-length
Nef sequence [SEQ ID NO:2189] is modified from
the HIV sequence database.

| | | |
|---|---|---|
| # | PEPTIDE | SEQUENCE ID |

| | | |
|---|---|---|
| 1 | MGGKWSKRSVVGWPT | SEQ ID NO:745 |
| 2 | WSKRSVVGWPTVRER | SEQ ID NO:746 |
| 3 | SVVGWPTVRERMRRA | SEQ ID NO:747 |
| 4 | WPTVRERMRRAEPAA | SEQ ID NO:748 |
| 5 | RERMRRAEPAAPGVG | SEQ ID NO:749 |
| 6 | RRAEPAAPGVGAVSR | SEQ ID NO:750 |
| 7 | PAADGVGAVSRDLEK | SEQ ID NO:751 |
| 8 | GVGAVSPDLEKHGAI | SEQ ID NO 752 |
| 9 | VSRDLEKHGAITSSN | SEQ ID NO:753 |
| 10 | LEKHGAITSSNTAAN | SEQ ID NO:754 |
| 11 | GAITSSNTAANNADC | SEQ ID NO:755 |
| 12 | SSNTAANNADCAWLE | SEQ ID NO:756 |
| 13 | AANNADCAWLEAQEE | SEQ ID NO:757 |
| 14 | ADCAWLEAQEEEEVG | SEQ ID NO:758 |
| 15 | WLEAQEEEEVGFPVR | SEQ ID NO:759 |
| 16 | QEEEEVGFPVRPQVP | SEQ ID NO:760 |
| 17 | EVGFPVRPQVPLRPM | SEQ ID NO:761 |
| 18 | PVRPQVPLRPMTYKA | SEQ ID NO:762 |
| 19 | QVPLRPMTYKAAVDL | SEQ ID NO:763 |
| 20 | RPMTYKAAVDLSHFL | SEQ ID NO:764 |
| 21 | YKAAVDLSHFLKEKG | SEQ ID NO:765 |
| 22 | VDLSHFLKEKGGLEG | SEQ ID NO:766 |
| 23 | HFLKEKGGLEGLIYS | SEQ ID NO:767 |
| 24 | EKGGLEGLIYSQKRQ | SEQ ID NO:768 |
| 25 | LEGLIYSQKRQDILD | SEQ ID NO:769 |
| 26 | IYSQKRQDILDLWVY | SEQ ID NO:770 |
| 27 | KRQDILDLWVYHTQG | SEQ ID NO:771 |
| 28 | ILDLWVYHTQGYFPD | SEQ ID NO:772 |
| 29 | WVYHTQGYFPDWQNY | SEQ ID NO:773 |
| 30 | TQGYFPDWQNYTPGP | SEQ ID NO:774 |
| 31 | FPDWQNYTPGPGIRY | SEQ ID NO:775 |
| 32 | QNYTPGPGIRYPLTF | SEQ ID NO:776 |
| 33 | PGPGIRYPLTFGWCF | SEQ ID NO:777 |
| 34 | IRYPLTFGWCFKLVP | SEQ ID NO:778 |
| 35 | LTFGWCFKLVPVEPE | SEQ ID NO:779 |
| 36 | WCFKLVPVEPEKVEE | SEQ ID NO:780 |
| 37 | LVPVEPEKVEEANEG | SEQ ID NO:781 |
| 38 | EPEKVEEANEGENNS | SEQ ID NO:782 |
| 39 | VEEANEGENNSLLHP | SEQ ID NO:783 |
| 40 | NEGENNSLLHPMSLH | SEQ ID NO:784 |
| 41 | NNSLLHPMSLHGMDD | SEQ ID NO:785 |
| 42 | LHPMSLHGMDDPERE | SEQ ID NO:786 |
| 43 | SLHGMDDPEREVLVW | SEQ ID NO:787 |
| 44 | MDDPEREVLVWKFDS | SEQ ID NO:788 |
| 45 | EREVLVWKFDSRLAF | SEQ ID NO:789 |
| 46 | LVWKFDSRLAFHHMA | SEQ ID NO:790 |
| 47 | FDSRLAFHHMARELH | SEQ ID NO:791 |
| 48 | LAFHHMARELHPEYY | SEQ ID NO:792 |
| 49 | HMARELHPEYYKDC | SEQ ID NO:793 |

[0192] TABLE 7

One embodiment of an HIV-1 consensus B clade
Pol peptide pool sequence. Each peptide is 15
amino acids in length and overlaps the
preceding peptide by 11 amino acids. Peptide
248 is 14 amino acids in length. The full-
length Pol sequence [SEQ ID NO:2190] is
modified from the H1V sequence database

| | | |
|---|---|---|
| # | PEPTIDE | SEQUENCE ID |

| | | |
|---|---|---|
| 1 | FFREDLAFPQGKARE | SEQ ID NO:794 |
| 2 | DLAFPQGKAREFSSE | SEQ ID NO:795 |
| 3 | PQGKAREFSSEQTRA | SEQ ID NO:796 |
| 4 | AREFSSEQTRANSPT | SEQ ID NO:797 |
| 5 | SSEQTRANSPTRREL | SEQ ID NO:798 |
| 6 | TRANSPTRRELQVWG | SEQ ID NO:799 |
| 7 | SPTRRELQVWGRDNN | SEQ ID NO:800 |
| 8 | RELQVWGRDNNSLSE | SEQ ID NO:801 |
| 9 | VWGRDNNSLSEAGAD | SEQ ID NO:802 |
| 10 | DNNSLSEAGADRQGT | SEQ ID NO:803 |
| 11 | LSEAGADRQGTVSFS | SEQ ID NO:804 |
| 12 | GADRQGTVSFSFPQI | SEQ ID NO:805 |
| 13 | QGTVSFSFPQITLWQ | SEQ ID NO:806 |
| 14 | SFSFPQITLWQRPLV | SEQ ID NO:807 |
| 15 | PQITLWQRPLVTIKI | SEQ ID NO:808 |
| 16 | LWQRPLVTIKIGGQL | SEQ ID NO:809 |
| 17 | PLVTIKIGGQLKEAL | SEQ ID NO:810 |
| 18 | IKIGGQLKEALLDTG | SEQ ID NO:811 |
| 19 | GQLKEALLDTGADDT | SEQ ID NO:812 |
| 20 | EALLDTGADDTVLEE | SEQ ID NO:813 |
| 21 | DTGADDTVLEEMNLP | SEQ ID NO:814 |
| 22 | DDTVLEEMNLPGRWK | SEQ ID NO:815 |
| 23 | LEEMNLPGRWKPKMI | SEQ ID NO:816 |
| 24 | NLPGRWKPKMIGGIG | SEQ ID NO:817 |
| 25 | RWKPKMIGGIGGFIK | SEQ ID NO:818 |
| 26 | KMIGGIGGFIKVRQY | SEQ ID NO:819 |
| 27 | GIGGFIKVRQYDQIL | SEQ ID NO:820 |
| 28 | FIKVRQYDQILIEIC | SEQ ID NO:821 |
| 29 | RQYDQILIEICGHKA | SEQ ID NO:822 |
| 30 | QILIEICGHKAIGTV | SEQ ID NO:823 |
| 31 | EICGHKAIGTVLVGP | SEQ ID NO:824 |
| 32 | HKAIGTVLVGPTPVN | SEQ ID NO:825 |
| 33 | GTVLVGPTPVNIIGR | SEQ ID NO:826 |
| 34 | VGPTPVNIIGRNLLT | SEQ ID NO:827 |
| 35 | PVNIIGRNLLTQIGC | SEQ ID NO:828 |
| 36 | IGRNLLTQIGCTLNF | SEQ ID NO:829 |
| 37 | LLTQIGCTLNFPISP | SEQ ID NO:830 |
| 38 | IGCTLNFPISPIETV | SEQ ID NO:831 |
| 39 | LNFPISPIETVPVKL | SEQ ID NO:832 |
| 40 | ISPIETVPVKLKPGM | SEQ ID NO:833 |
| 41 | ETVPVKLKPGMDGPK | SEQ ID NO:834 |
| 42 | VKLKPGMDGPKVKQW | SEQ ID NO:835 |
| 43 | PGMDGPKVKQWPLTE | SEQ ID NO:836 |
| 44 | GPKVKQWPLTEEKIK | SEQ ID NO:837 |
| 45 | KQWPLTEEKIKALVE | SEQ ID NO:838 |
| 46 | LTEEKIKALVEICTE | SEQ ID NO:839 |
| 47 | KIKALVEICTEMEKE | SEQ ID NO:840 |
| 48 | LVEICTEMEKEGKIS | SEQ ID NO:841 |
| 49 | CTEMEKEGKISKIGP | SEQ ID NO:842 |
| 50 | EKEGKISKIGPENPY | SEQ ID NO:843 |
| 51 | KISKIGPENPYNTPV | SEQ ID NO:844 |
| 52 | IGPENPYNTPVFAIK | SEQ ID NO:845 |
| 53 | NPYNTPVFAIKKKDS | SEQ ID NO:846 |
| 54 | TPVFAIKKKDSTKWR | SEQ ID NO:847 |
| 55 | AIKKKDSTKWRKLVD | SEQ ID NO:848 |
| 56 | KDSTKWRKLVDFREL | SEQ ID NO:849 |
| 57 | KWRKLVDFRELNKRT | SEQ ID NO:850 |
| 58 | LVDFRELNKRTQDFW | SEQ ID NO:851 |
| 59 | RELNKRTQDFWEVQL | SEQ ID NO:852 |
| 60 | KRTQDFWEVQLGIPH | SEQ ID NO:853 |
| 61 | DFWEVQLGIPHPAGL | SEQ ID NO:854 |
| 62 | VQLGIPHPAGLKKKK | SEQ ID NO:855 |
| 63 | IPHPAGLKKKKSVTV | SEQ ID NO:856 |
| 64 | AGLKKKKSVTVLDVG | SEQ ID NO:857 |
| 65 | KKKSVTVLDVGDAYF | SEQ ID NO:858 |
| 66 | VTVLDVGDAYFSVPL | SEQ ID NO:859 |
| 67 | DVGDAYFSVPLDKDF | SEQ ID NO:860 |
| 68 | AYFSVPLDKDFRKYT | SEQ ID NO:861 |
| 69 | VPLDKDFRKYTAFTI | SEQ ID NO:862 |
| 70 | KDFRKYTAFTIPSIN | SEQ ID NO:863 |
| 71 | KYTAFTIPSINNETP | SEQ ID NO:864 |
| 72 | FTIPSINNETPGIRY | SEQ ID NO:865 |
| 73 | SINNETPGIRYQYNV | SEQ ID NO:866 |
| 74 | ETPGIRYQYNVLPQG | SEQ ID NO:867 |
| 75 | IRYQYNVLPQGWKGS | SEQ ID NO:868 |
| 76 | YNVLPQGWKGSPAIF | SEQ ID NO:869 |
| 77 | PQGWKGSPAIFQSSM | SEQ ID NO:870 |
| 78 | KGSPAIFQSSMTKIL | SEQ ID NO:871 |
| 79 | AIFQSSMTKILEPFR | SEQ ID NO:872 |
| 80 | SSMTKILEPFRKQNP | SEQ ID NO:873 |
| 81 | KILEPFRKQNPDIVI | SEQ ID NO:874 |
| 82 | PFRKQNPDIVIYQYM | SEQ ID NO:875 |
| 83 | QNPDIVIYQYMDDLY | SEQ ID NO:876 |
| 84 | IVIYQYMDDLYVGSD | SEQ ID NO:877 |
| 85 | QYMDDLYVGSDLEIG | SEQ ID NO:878 |
| 86 | DLYVGSDLEIGQHRT | SEQ ID NO:879 |
| 87 | GSDLEIGQHRTKIEE | SEQ ID NO:880 |
| 88 | EIGQHRTKIEELRQH | SEQ ID NO:881 |
| 89 | HRTKIEELRQHLLRW | SEQ ID NO:882 |
| 90 | IEELRQHLLRWGFTT | SEQ ID NO:883 |
| 91 | RQHLLRWGFTTPDKK | SEQ ID NO:884 |
| 92 | LRWGFTTPDKKRQKE | SEQ ID NO:885 |
| 93 | FTTPDKKHQKEPPFL | SEQ ID NO:886 |
| 94 | DKKHQKEPPFLWMGY | SEQ ID NO:887 |
| 95 | QKEPPFLWMGYELHP | SEQ ID NO:888 |
| 96 | PFLWMGYELHPDKWT | SEQ ID NO:889 |
| 97 | MGYELHPDKWTVQPI | SEQ ID NO:890 |
| 98 | LHPDKWTVQPIVLPE | SEQ ID NO:891 |
| 99 | KWTVQPIVLPEKDSW | SEQ ID NO:892 |
| 100 | QPIVLPEKDSWTVND | SEQ ID NO:893 |
| 101 | LPEKDSWTVNDIQKL | SEQ ID NO:894 |
| 102 | DSWTVNDIQKLVGKL | SEQ ID NO:895 |
| 103 | VNDIQKLVGKLNWAS | SEQ ID NO:896 |
| 104 | QKLVGKLNWASQIYA | SEQ ID NO:897 |
| 105 | GKLNWASQIYAGIKV | SEQ ID NO:898 |
| 106 | WASQIYAGIKVKQLC | SEQ ID NO:899 |
| 107 | IYAGIKVKQLCKLLR | SEQ ID NO:900 |
| 108 | IKVKQLCKLLRGTKA | SEQ ID NO:901 |
| 109 | QLCKLLRGTKALTEV | SEQ ID NO:902 |
| 110 | LLRGTKALTEVIPLT | SEQ ID NO:903 |
| 111 | TKALTEVIPLTEEAE | SEQ ID NO:904 |
| 112 | TEVIPLTEEAELELA | SEQ ID NO:905 |
| 113 | PLTEEAELELAENRE | SEQ ID NO:906 |
| 114 | EAELELAENREILKE | SEQ ID NO:907 |
| 115 | ELAENREILKEPVHG | SEQ ID NO:908 |
| 116 | NREILKEPVHGVYYD | SEQ ID NO:909 |
| 117 | LKEPVHGVYYDPSKD | SEQ ID NO:910 |
| 118 | VHGVYYDPSKDLIAE | SEQ ID NO:911 |
| 119 | YYDPSKDLIAEIQKQ | SEQ ID NO:912 |
| 120 | SKDLIAEIQKQGQGQ | SEQ ID NO:913 |
| 121 | IAEIQKQGQGQWTYQ | SEQ ID NO:914 |
| 122 | QKQGQGQWTYQIYQE | SEQ ID NO:915 |
| 123 | QGQWTYQIYQEPFKN | SEQ ID NO:916 |
| 124 | TYQIYQEPFKNLKTG | SEQ ID NO:917 |
| 125 | YQEPFKNLKTGKYAR | SEQ ID NO:918 |
| 126 | FKNLKTGKYARMRGA | SEQ ID NO:919 |
| 127 | KTGKYARMRGAHTND | SEQ ID NO:920 |
| 128 | YARMRGAHTNDVKQL | SEQ ID NO:921 |
| 129 | RGAHTNDVKQLTEAV | SEQ ID NO:922 |
| 130 | TNDVKQLTEAVQKIA | SEQ ID NO:923 |
| 131 | KQLTEAVQKIATESI | SEQ ID NO:924 |
| 132 | EAVQKIATESIVIWG | SEQ ID NO:925 |
| 133 | KIATESIVIWGKTPK | SEQ ID NO:926 |
| 134 | ESIVIWGKTPKFKLP | SEQ ID NO:927 |
| 135 | IWGKTPKFKLPIQKE | SEQ ID NO:928 |
| 136 | TPKFKLPIQKETWEA | SEQ ID NO:929 |
| 137 | KLPIQKETWEAWWTE | SEQ ID NO:930 |
| 138 | QKETWEAWWTEYWQA | SEQ ID NO:931 |
| 139 | WEAWWTEYWQATWIP | SEQ ID NO:932 |
| 140 | WTEYWQATWIPEWEF | SEQ ID NO:933 |
| 141 | WQATWIPEWEFVNTP | SEQ ID NO:934 |
| 142 | WIPEWEFVNTPPLVK | SEQ ID NO:935 |
| 143 | WEFVNTPPLVKLWYQ | SEQ ID NO:936 |
| 144 | NTPPLVKLWYQLEKE | SEQ ID NO:937 |
| 145 | LVKLWYQLEKEPIVG | SEQ ID NO:938 |
| 146 | WYQLEKEPIVGAETF | SEQ ID NO:939 |
| 147 | EKEPIVGAETFYVDG | SEQ ID NO:940 |
| 148 | IVGAETFYVDGAANR | SEQ ID NO:941 |
| 149 | ETFYVDGAANRETKL | SEQ ID NO:942 |
| 150 | VDGAANRETKLGKAG | SEQ ID NO:943 |
| 151 | ANRETKLGKAGYVTD | SEQ ID NO:944 |
| 152 | TKLGKAGYVTDRGRQ | SEQ ID NO:945 |
| 153 | KAGYVTDRGRQKVVS | SEQ ID NO:946 |
| 154 | VTDRGRQKVVSLTDT | SEQ ID NO:947 |
| 155 | GRQKVVSLTDTTNQK | SEQ ID NO:948 |
| 156 | VVSLTDTTNQKTELQ | SEQ ID NO:949 |
| 157 | TDTTNQKTELQAIHL | SEQ ID NO:950 |
| 158 | NQKTELQAIHLALQD | SEQ ID NO:951 |
| 159 | ELQAIHLALQDSGLE | SEQ ID NO:952 |
| 160 | IHLALQDSGLEVNIV | SEQ ID NO:953 |
| 161 | LQDSGLEVNIVTDSQ | SEQ ID NO:954 |
| 162 | GLEVNIVTDSQYALG | SEQ ID NO:955 |
| 163 | NIVTDSQYALGIIQA | SEQ ID NO:956 |
| 164 | DSQYALGIIQAQPDK | SEQ ID NO:957 |
| 165 | ALGIIQAQPDKSESE | SEQ ID NO:958 |
| 166 | IQAQPDKSESELVSQ | SEQ ID NO:959 |
| 167 | PDKSESELVSQIIEQ | SEQ ID NO:960 |
| 168 | ESELVSQIIEQLIKK | SEQ ID NO:961 |
| 169 | VSQIIEQLIKKEKVY | SEQ ID NO:962 |
| 170 | IEQLIKKEKVYLAWV | SEQ ID NO:963 |
| 171 | IKKEKVYLAWVPAHK | SEQ ID NO:964 |
| 172 | KVYLAWVPAHKGIGG | SEQ ID NO:965 |
| 173 | AWVPAHKGIGGNEQV | SEQ ID NO:966 |
| 174 | AHKGIGGNEQVDKLV | SEQ ID NO:967 |
| 175 | IGGNEQVDKLVSAGI | SEQ ID NO:968 |
| 176 | EQVDKLVSAGIRKVL | SEQ ID NO:969 |
| 177 | KLVSAGIRKVLFLDG | SEQ ID NO:970 |
| 178 | AGIRKVLFLDGIDKA | SEQ ID NO:971 |
| 179 | KVLFLDGIDKAQEEH | SEQ ID NO:972 |
| 180 | LDGIDKAQEEHEKYH | SEQ ID NO:973 |
| 181 | DKAQEEHEKYHSNWR | SEQ ID NO:974 |
| 182 | EEHEKYHSNWRAMAS | SEQ ID NO:975 |
| 183 | KYHSNWRAMASDFNL | SEQ ID NO:976 |
| 184 | NWRAMASDFNLPPVV | SEQ ID NO:977 |
| 185 | MASDFNLPPVVAKEI | SEQ ID NO:978 |
| 186 | FNLPPVVAKEIVASC | SEQ ID NO:979 |
| 187 | PVVAKEIVASCDKCQ | SEQ ID NO:980 |
| 188 | KEIVASCDKCQLKGE | SEQ ID NO:981 |
| 189 | ASCDKCQLKGEAMHG | SEQ ID NO:982 |
| 190 | KCQLKGEAMHGQVDC | SEQ ID NO:983 |
| 191 | KGEAMHGQVDCSPGI | SEQ ID NO:984 |
| 192 | MHGQVDCSPGIWQLD | SEQ ID NO:985 |
| 193 | VDCSPGIWQLDCTHL | SEQ ID NO:986 |
| 194 | PGIWQLDCTHLEGKI | SEQ ID NO:987 |
| 195 | QLDCTHLEGKIILVA | SEQ ID NO:988 |
| 196 | THLEGKIILVAVHVA | SEQ ID NO:989 |
| 197 | GKIILVAVHVASGYI | SEQ ID NO:990 |
| 198 | LVAVHVASGYIEAEV | SEQ ID NO:991 |
| 199 | HVASGYIEAEVIPAE | SEQ ID NO:992 |
| 200 | GYIEAEVIPAETGQE | SEQ ID NO:993 |
| 201 | AEVIPAETGQETAYF | SEQ ID NO:994 |
| 202 | PAETGQETAYFLLKL | SEQ ID NO:995 |
| 203 | GQETAYFLLKLAGRW | SEQ ID NO:996 |
| 204 | AYFLLKLAGRWPVKT | SEQ ID NO:997 |
| 205 | LKLAGRWPVKTIHTD | SEQ ID NO:998 |
| 206 | GRWPVKTIHTDNGSN | SEQ ID NO:999 |
| 207 | VKTIHTDNGSNFTST | SEQ ID NO:1000 |
| 208 | HTDNGSNFTSTTVKA | SEQ ID NO:1001 |
| 209 | GSNFTSTTVKAACWW | SEQ ID NO:1002 |
| 210 | TSTTVKAACWWAGIK | SEQ ID NO:1003 |
| 211 | VKAACWWAGIKQEFG | SEQ ID NO:1004 |
| 212 | CWWAGIKQEFGIPYN | SEQ ID NO:1005 |
| 213 | GIKQEFGIPYNPQSQ | SEQ ID NO:1006 |
| 214 | EFGIPYNPQSQGVVE | SEQ ID NO:1007 |
| 215 | PYNPQSQGVVESMNK | SEQ ID NO:1008 |
| 216 | QSQGVVESMNKELKK | SEQ ID NO:1009 |
| 217 | VVESMNKELKKIIGQ | SEQ ID NO:1010 |
| 218 | MNKELKKIIGQVRDQ | SEQ ID NO:1011 |
| 219 | LKKIIGQVRDQAEHL | SEQ ID NO:1012 |
| 220 | IGQVRDQAEHLKTAV | SEQ ID NO:1013 |
| 221 | RDQAEHLKTAVQMAV | SEQ ID NO:1014 |
| 222 | EHLKTAVQMANFIHN | SEQ ID NO:1015 |
| 223 | TAVQMAVFIHNFKRK | SEQ ID NO:1016 |
| 224 | MAVFIHNFKRKGGIG | SEQ ID NO:1017 |
| 225 | IHNFKRKGGIGGYSA | SEQ ID NO:1018 |
| 226 | KRKGGIGGYSAGERI | SEQ ID NO:1019 |
| 227 | GIGGYSAGERIVDII | SEQ ID NO:1020 |
| 228 | YSAGERIVDIIATDI | SEQ ID NO:1021 |
| 229 | ERIVIIATDIQTKE | SEQ ID NO:1022 |
| 230 | DIIATDIQTKELQKQ | SEQ ID NO:1023 |
| 231 | TDIQTKELQKQITKI | SEQ ID NO:1024 |
| 232 | TKELQKQITKIQNFR | SEQ ID NO:1025 |
| 233 | QKQITKIQNFRVYRD | SEQ ID NO:1026 |
| 234 | TKIQNFRVYRDSRDP | SEQ ID NO:1027 |
| 235 | NFRVYRDSRDPLWKG | SEQ ID NO:1028 |
| 236 | YRDSRDPLWKGPAKL | SEQ ID NO:1029 |
| 237 | RDPLWKGPAKLLWKG | SEQ ID NO:1030 |
| 238 | WKGPAKLLWKGEGAV | SEQ ID NO:1031 |
| 239 | AKLLWKGEGAVVIQD | SEQ ID NO:1032 |
| 240 | WKGEGAVVIQDNSDI | SEQ ID NO:1033 |
| 241 | GAVVIQDNSDIKVVP | SEQ ID NO:1034 |
| 242 | IQDNSDIKVVPRRKA | SEQ ID NO:1035 |
| 243 | SDIKVVPRRKAKIIR | SEQ ID NO:1036 |
| 244 | VVPRRKAKIIRDYGK | SEQ ID NO:1037 |
| 245 | RKAKIIRDYGKQMAG | SEQ ID NO:1038 |
| 246 | IIRDYGKQMAGDDCV | SEQ ID NO:1039 |
| 247 | YGKQMAGDDCVASRQ | SEQ ID NO:1040 |
| 248 | MAGDDCVASRQDED | SEQ ID NO:1041 |

[0193] TABLE 8

One embodiment of an HIV-1 consensus B clade
Rev peptide pool sequence. Each peptide is 15
amino acids in length and overlaps the
preceding peptide by 11 amino acids. Peptide 27
is 13 amino acids in length. The full-length
Rev sequence [SEQ ID NO:2191] is modified from
the HIV sequence database.

| | | |
|---|---|---|
| # | PEPTIDE | SEQUENCE ID |

| | | |
|---|---|---|
| 1 | MAGRSGDSDEELLKTL | SEQ ID NO:1042 |
| 2 | SGDSDEELLKTVRLIC | SEQ ID NO:1043 |
| 3 | DEELLKTVRLIKFLYC | SEQ ID NO:1044 |
| 4 | LKTVRLIKFLYQSNPG | SEQ ID NO:1045 |
| 5 | RLIKFLYQSNPPPSPV | SEQ ID NO:1046 |
| 6 | FLYQSNPPPSPEGTRQ | SEQ ID NO:1047 |
| 7 | SNPPPSPEGTRQARRE | SEQ ID NO:1048 |
| 8 | PSPEGTRQARRNRRR | SEQ ID NO:1049 |
| 9 | GTRQARRNRRRRWRE | SEQ ID NO:1050 |
| 10 | ARRNRRRRWRERQRQ | SEQ ID NO:1051 |
| 11 | RRRRWRERQRQIRSI | SEQ ID NO:1052 |
| 12 | WRERQRQIRSISEWI | SEQ ID NO:1053 |
| 13 | QRQIRSISEWILSTY | SEQ ID NO:1054 |
| 14 | RSISEWILSTYLGRP | SEQ ID NO:1055 |
| 15 | EWILSTYLGRPAEPV | SEQ ID NO:1056 |
| 16 | STYLGRPAEPVPLQL | SEQ ID NO:1057 |
| 17 | GRPAEPVPLQLPPLE | SEQ ID NO:1058 |
| 18 | EPVPLQLPPLERLTL | SEQ ID NO:1059 |
| 19 | LQLPPLERLTLDCNE | SEQ ID NO:1060 |
| 20 | PLERLTLDCNEDCGT | SEQ ID NO:1061 |
| 21 | TLDCNEDCGTSGTQ | SEQ ID NO:1062 |
| 22 | NEDCGTSGTQGVGS | SEQ ID NO:1063 |
| 23 | GTSGTQGVGSPQIL | SEQ ID NO:1064 |
| 24 | TQGVGSPQILVESP | SEQ ID NO:1065 |
| 25 | GSPQILVESPAVLE | SEQ ID NO:1066 |
| 26 | ILVESPAVLESGTK | SEQ ID NO:1067 |
| 27 | SPAVLESGTKEE | SEQ ID NO:1068 |

[0194] TABLE 9

One embodiment of an HIV-1 consensus B clade
Tat peptide pool sequence. Each peptide is 15
amino acids in length and overlaps the
preceding peptide by 11 amino acids. Peptide 24
is 14 amino acids in length. The full-length
Tat sequence [SEQ ID NO:2192] is modified from
the HIV sequence database.

| | | |
|---|---|---|
| # | PEPTIDE | SEQUENCE ID |

| | | |
|---|---|---|
| 1 | MEPVDPRLEPWKMPGP | SEQ ID NO:1069 |
| 2 | DPRLEPWKHPGSQPKP | SEQ ID NO:1070 |
| 3 | EPWKHPGSQPKTACTK | SEQ ID NO:1071 |
| 4 | HPGSQPKTACTNCYCK | SEQ ID NO:1072 |
| 5 | QPKTACTNCYCKKCC | SEQ ID NO:1073 |
| 6 | ACTNCYCKKCCFHCQ | SEQ ID NO:1074 |
| 7 | CYCKKCCFHCQVCFI | SEQ ID NO:1075 |
| 8 | KCCFHCQVCFITKGL | SEQ ID NO:1076 |
| 9 | HCQVCFITKGLGISY | SEQ ID NO:1077 |
| 10 | CFITKGLGISYGRKK | SEQ ID NO:1078 |
| 11 | KGLGISYGRKKRRQR | SEQ ID NO:1079 |
| 12 | ISYGRKKRRQRRRAP | SEQ ID NO:1080 |
| 13 | RKKRRQRRRAPQDSQ | SEQ ID NO:1081 |
| 14 | RQRRRAPQDSQTHQV | SEQ ID NO:1082 |
| 15 | RAPQDSQTHQVSLSK | SEQ ID NO:1083 |
| 16 | DSQTHQVSLSKQPAS | SEQ ID NO:1084 |
| 17 | HQVSLSKQPASQPRG | SEQ ID NO:1085 |
| 18 | LSKQPASQPRGDPTG | SEQ ID NO:1086 |
| 19 | PASQPRGDPTGPKES | SEQ ID NO:1087 |
| 20 | RGDPTGPKESKKKV | SEQ ID NO:1088 |
| 21 | TGPKESKKKVERET | SEQ ID NO:1089 |
| 22 | ESKKKVERETETDP | SEQ ID NO:1090 |
| 23 | KVERETETDPVDQ | SEQ ID NO:1091 |

[0195] TABLE 10

One embodiment of an HIV-1 consensus B clade
Vif peptide pool sequence. Each peptide is 15
amino acids in length and overlaps the
preceding peptide by 11 amino acids. Peptide 46
is 12 amino acids in length. The full-length
Vif sequence [SEQ ID NO:2193] is modified from
the HIV sequence database.

| | | |
|---|---|---|
| # | PEPTIDE | SEQUENCE ID |

| | | |
|---|---|---|
| 1 | MENRWQVMIVWQVDR | SEQ ID NO:1092 |
| 2 | WQVMIVWQVDRMRIR | SEQ ID NO:1093 |
| 3 | IVWQVDRMRIRTWKS | SEQ ID NO:1094 |
| 4 | VDRMRIRTWKSLVKH | SEQ ID NO:1095 |
| 5 | RIRTWKSLVKHHMYI | SEQ ID NO:109 |
| 6 | WKSLVKHHMYISRKA | SEQ ID NO:1097 |
| 7 | VKHHMYISRKAKGWF | SEQ ID NO:1098 |
| 8 | MYISRKAKGWFYRHH | SEQ ID NO:1099 |
| 9 | RKAKGWFYRHHYEST | SEQ ID NO:1100 |
| 10 | GWFYRHHYESTHPRI | SEQ ID NO:1101 |
| 11 | RHHYESTHPRISSEV | SEQ ID NO:1102 |
| 12 | ESTHPRISSEVHIPL | SEQ ID NO:1103 |
| 13 | PRISSEVHIPLGDAR | SEQ ID NO:1104 |
| 14 | SEVHIPLGDARLVIT | SEQ ID NO:1105 |
| 15 | IPLGDARLVITTYWG | SEQ ID NO:1106 |
| 16 | DARLVITTYWGLHTG | SEQ ID NO:1107 |
| 17 | VITTYWGLHTGERDW | SEQ ID NO:1108 |
| 18 | YWGLHTGERDWHLGQ | SEQ ID NO:1109 |
| 19 | HTGERDWHLGQGVSI | SEQ ID NO:1110 |
| 20 | RDWHLGQGVSIEWRK | SEQ ID NO:1111 |
| 21 | LGQGVSIEWRKKRYS | SEQ ID NO:1112 |
| 22 | VSIEWRKKRYSTQVD | SEQ ID NO:1113 |
| 23 | WRKKRYSTQVDPDLA | SEQ ID NO:1114 |
| 24 | RYSTQVDPDLADQLI | SEQ ID NO:1115 |
| 25 | QVDPDLADQLIHLYY | SEQ ID NO:1116 |
| 26 | DLADQLIHLYYFDCF | SEQ ID NO:1117 |
| 27 | QLIHLYYFDCFSESA | SEQ ID NO:1118 |
| 28 | LYYFDCFSESAIRNA | SEQ ID NO:1119 |
| 29 | DCFSESAIRNAILGH | SEQ ID NO:1120 |
| 30 | ESAIRNAILGHIVSP | SEQ ID NO:1121 |
| 31 | RNAILGHIVSPRCEY | SEQ ID NO:1122 |
| 32 | LGHIVSPRCEYQAGH | SEQ ID NO:1123 |
| 33 | VSPRCEYQAGHNKVG | SEQ ID NO:1124 |
| 34 | CEYQAGHNKVGSLQY | SEQ ID NO:1125 |
| 35 | AGHNKVGSLQYLALA | SEQ ID NO:1126 |
| 36 | KVGSLQYLALAALIT | SEQ ID NO:1127 |
| 37 | LQYLALAALITPKKI | SEQ ID NO:1128 |
| 38 | ALAALITPKKIKPPL | SEQ ID NO:1129 |
| 39 | LITPKKIKPPLPSVT | SEQ ID NO:1130 |
| 40 | KKIKPPLPSVTKLTE | SEQ ID NO:1131 |
| 41 | PPLPSVTKLTEDRWNK | SEQ ID NO:1132 |
| 42 | PPLPSVTKLTEDRWN | SEQ ID NO:1133 |
| 43 | SVTKLTEDRWNKPQK | SEQ ID NO:1134 |
| 44 | LTEDRWNKPQKTKGH | SEQ ID NO:1135 |
| 45 | RWNKPQRTKGHRGSH | SEQ ID NO:1136 |
| 46 | PQKTKGHRGSHTMNG | SEQ ID NO:1137 |
| 47 | KGHRGSHTMNGH | SEQ ID NO:1138 |
| 48 | PQKTKGHRGSHTMNGH | SEQ ID NO:1139 |

[0196] TABLE 11

One embodiment of an HIV-1 consensus B
clade Vpr peptide pool sequence. Each
peptide is 15 amino acids in length and
overlaps the preceding peptide by 11
amino acids. Peptide 22 is 12 amino
acids in length. The full-length Vpr
sequence [SEQ ID NO:2194] is modified
from the HIV sequence database.

| | | |
|---|---|---|
| # | PEPTIDE | SEQUENCE ID |

| | | |
|---|---|---|
| 1 | MEQAPEDQGPQREPYI | SEQ ID NO:1140 |
| 2 | PEDQGPQREPYNEWTR | SEQ ID NO:1141 |
| 3 | GPQREPYNEWTLELL | SEQ ID NO:1142 |
| 4 | EPYNEWTLELLEELK | SEQ ID NO:1143 |
| 5 | EWTLELLEELKSEAV | SEQ ID NO:1144 |
| 6 | ELLEELKSEAVRHFP | SEQ ID NO:1145 |
| 7 | ELKSEAVRHFPRIWL | SEQ ID NO:1146 |
| 8 | EAVRHFPRIWLHGLG | SEQ ID NO:1147 |
| 9 | RFPRIWLHGLGQHIY | SEQ ID NO:1148 |
| 10 | IWLHGLGQHIYETYG | SEQ ID NO:1149 |
| 11 | GLGQHIYETYGDTWA | SEQ ID NO:1150 |
| 12 | RIYETYGDTWAGVEA | SEQ ID NO:1151 |
| 13 | TYGDTWAGVEAIIRI | SEQ ID NO:1152 |
| 14 | TWAGVEAIIRILQQL | SEQ ID NO:1153 |
| 15 | VEAIIRILQQLLFIH | SEQ ID NO:1154 |
| 16 | IRILQQLLFIHFRIG | SEQ ID NO:1155 |
| 17 | QQLLFIHFRIGCQHS | SEQ ID NO:1156 |
| 18 | FIHFRIGCQHSRIGI | SEQ ID NO:1157 |
| 19 | RIGCQHSRIGITRQR | SEQ ID NO:1158 |
| 20 | QHSRIGITRQRRARN | SEQ ID NO:1159 |
| 21 | GITRQRRARNGASR | SEQ ID NO:1160 |
| 22 | QRRARGASRS | SEQ ID NO:1161 |

[0197] TABLE 12

One embodiment of an HIV-1 consensus B
clade Vpu peptide pool sequence. Each
peptide is 15 amino acids in length and
overlaps the preceding peptide by 11
amino acids. Peptide 18 is 13 amino
acids in length. The full-length Vpu
sequence [SEQ ID NO:2195] is modified
from the HIV sequence database.

| | | |
|---|---|---|
| # | PEPTIDE | SEQUENCE ID |

| | | |
|---|---|---|
| 1 | MQSLQILAIVALVVA | SEQ ID NO:1162 |
| 2 | QILAIVALVVAAIIA | SEQ ID NO:1163 |
| 3 | IVALVVAAIIAIVVW | SEQ ID NO:1164 |
| 4 | VVAAIIAIVVWSIVF | SEQ ID NO:1165 |
| 5 | IIAIVVWSIVFIEYR | SEQ ID NO:1166 |
| 6 | VVWSIVFIEYRKILR | SEQ ID NO:1167 |
| 7 | IVFIEYRKILRQRKI | SEQ ID NO:1168 |
| 8 | EYRKILRQRKIDRLI | SEQ ID NO:1169 |
| 9 | ILRQRKIDRLIDRIR | SEQ ID NO:1170 |
| 10 | RKIDRLIDRIRERAE | SEQ ID NO:1171 |
| 11 | RLIDRIRERAEDSGN | SEQ ID NO:1172 |
| 12 | RIRERAEDSGNESEG | SEQ ID NO:1173 |
| 13 | RAEDSGNESEGDQEE | SEQ ID NO:1174 |
| 14 | SGNESEGDQEELSAL | SEQ ID NO:1175 |
| 15 | SEGDQEELSALVEMG | SEQ ID NO:1176 |
| 16 | QEELSALVEMGHHAP | SEQ ID NO:1177 |
| 17 | SALVEMGHHAPWDVD | SEQ ID NO:1178 |
| 18 | EMGHHAPWDVDDL | SEQ ID NO:1179 |

[0198] TABLE 13

One embodiment of a peptide pool
sequence of HCV 1a H77. Each peptide is
18 amino acids in length and overlaps
the preceding peptide by 11 amino acids.
Peptide couples 25 & 26, 153 & 154,
220 & 221, 239 & 240, 242 & 243,
244 & 245, 345 & 346 are divided into
15- and 14-mers due to problematic
sequences of the original 18-mer
peptide. The full-length HCV 1a H77
sequence [SEQ ID NO:2196] is modified
from the HCV sequence database.

| | | |
|---|---|---|
| # | PEPTIDE | SEQUENCE ID |

| | | |
|---|---|---|
| 1 | MSTNPKPQRKTKRNTNRR | SEQ ID NO:1180 |
| 2 | QRKTKRNTNRRPQDVKFP | SEQ ID NO:1181 |
| 3 | TNRRPQDVKFPGGGQIVG | SEQ ID NO:1182 |
| 4 | VKFPGGGQIVGGVYYLPR | SEQ ID NO:1183 |
| 5 | QIVGGVYLLPRRGPRLGV | SEQ ID NO:1184 |
| 6 | LLPRRGPRLGVRATRKTS | SEQ ID NO:1185 |
| 7 | RLGVRATRKTSERSQPRG | SEQ ID NO:1186 |
| 8 | RKTSERSQPRGRRQPIPK | SEQ ID NO:1187 |
| 9 | QPRGRRQPIPKARRPEGR | SEQ ID NO:1188 |
| 10 | PIPKARRPEGRTWAQPGY | SEQ ID NO:1189 |
| 11 | PEGRTWAQPGYPWPLYGN | SEQ ID NO:1190 |
| 12 | QPGYPWPLYGNEGCGWAG | SEQ ID NO:1191 |
| 13 | LYGNEGCGWAGWLLSPRG | SEQ ID NO:1192 |
| 14 | GWAGWLLSPRGSRPSWGP | SEQ ID NO:1193 |
| 15 | SPRGSRPSWGPTDPRRRS | SEQ ID NO:1194 |
| 16 | SWGPTDPRRRSRNLGKVI | SEQ ID NO:1195 |
| 17 | RRRSRNLGKVIDTLTCGF | SEQ ID NO:1196 |
| 18 | GKVIDTLTCGFADLMGYI | SEQ ID NO:1197 |
| 19 | TCGFADLMGYIPLVGAPL | SEQ ID NO:1198 |
| 20 | MGYIPLVGAPLGGAARAL | SEQ ID NO:1199 |
| 21 | GAPLGGAARALAHGVRVL | SEQ ID NO:1200 |
| 22 | ARALAHGVRVLEDGVNYA | SEQ ID NO:1201 |
| 23 | VRVLEDGVNYATGNLPGC | SEQ ID NO:1202 |
| 24 | VNYATGNLPGCSFSIFLL | SEQ ID NO:1203 |
| 25 | LPGCSFSIFLLALLS | SEQ ID NO:1204 |
| 26 | SFSIFLLALLSCLT | SEQ ID NO:1205 |
| 27 | IFLLALLSCLTVPASAYQ | SEQ ID NO:1206 |
| 28 | SCLTVPASAYQVRNSSGL | SEQ ID NO:1207 |
| 29 | SAYQVRNSSGLYHVTNDC | SEQ ID NO:1208 |
| 30 | SSGLYHVTNDCPNSSIVY | SEQ ID NO:1209 |
| 31 | TNDCPNSSIVYEAADAIL | SEQ ID NO:1210 |
| 32 | SIVYEAADAILHTPGCVP | SEQ ID NO:1211 |
| 33 | DAILHTPGCVPCVREGNA | SEQ ID NO:1212 |
| 34 | GCVPCVREGNASRCWVAV | SEQ ID NO:1213 |
| 35 | EGNASRCWVAVTPTVATR | SEQ ID NO:1214 |
| 36 | WVAVTPTVATRDGKIPTT | SEQ ID NO:1215 |
| 37 | VATRDGKLPTTQLRRHID | SEQ ID NO:1216 |
| 38 | LPTTQLRRHIDLLVGSAT | SEQ ID NO:1217 |
| 39 | RRIDLLVGSATLCSALYV | SEQ ID NO:1218 |
| 40 | GSATLCSALYVGDLCGSV | SEQ ID NO:1219 |
| 41 | ALYVGDLCGSVFLVGQLF | SEQ ID NO:1220 |
| 42 | CGSVFLVGQLFTFSPRRH | SEQ ID NO:1221 |
| 43 | GQLFTFSPRRHWTTQDCN | SEQ ID NO:1222 |
| 44 | PRRRWTTQDCNCSIYPGH | SEQ ID NO:1223 |
| 45 | QDCNCSIYPGHITGHRMA | SEQ ID NO:1224 |
| 46 | YPGHITGHRMAWDMMMNW | SEQ ID NO:1225 |
| 47 | HRMAWDMMMNWSPTAALV | SEQ ID NO:1226 |
| 48 | MMNWSPTAALVVAQLLRI | SEQ ID NO:1227 |
| 49 | AALVVAQLLRIPQAIMDM | SEQ ID NO:1228 |
| 50 | LLRIPQAIMDMIAGAHWG | SEQ ID NO:1229 |
| 51 | IMDMIAGAHWGVLAGIAY | SEQ ID NO:1230 |
| 52 | AHWGVLAGIAYFSMVGNW | SEQ ID NO:1231 |
| 53 | GIAYFSMVGNWAKVLVVL | SEQ ID NO:1232 |
| 54 | VGNWAKVLVVLLLFAGVD | SEQ ID NO:1233 |
| 55 | LVVLLLFAGVDAETHVTG | SEQ ID NO:1234 |
| 56 | AGVDAETHVTGGSAGRTT | SEQ ID NO:1235 |
| 57 | HVTGGSAGRTTAGLVGLL | SEQ ID NO:1236 |
| 58 | GRTTAGLVGLLTPGAKQN | SEQ ID NO:1237 |
| 59 | VGLLTPGAKQNIQLINTN | SEQ ID NO:1238 |
| 60 | AKQNIQLINTNGSWHINS | SEQ ID NO:1239 |
| 61 | INTNGSWHINSTALNCNE | SEQ ID NO:1240 |
| 62 | HINSTALNCNESLNTGWL | SEQ ID NO:1241 |
| 63 | NCNESLNTGWLAGLFYQH | SEQ ID NO:1242 |
| 64 | TGWLAGLFYQHKFNSSGC | SEQ ID NO:1243 |
| 65 | FYQHKPNSSGCPERLASC | SEQ ID NO:1244 |
| 66 | SSGCPERLASCPRLTDFA | SEQ ID NO:1245 |
| 67 | LASCRRLTDFAQGWGPIS | SEQ ID NO:1246 |
| 68 | TDFAQGWGPISYANGSGL | SEQ ID NO:1247 |
| 69 | GPISYANGSGLDERPYCW | SEQ ID NO:1248 |
| 70 | GSGLDERPYCWHYPPRPC | SEQ ID NO:1249 |
| 71 | PYCWHYPPRPCGIVPAKS | SEQ ID NO:1250 |
| 72 | PRPCGIVPAKSVCGPVYC | SEQ ID NO:1251 |
| 73 | PAKSVCGPVYCFTPSPVV | SEQ ID NO:1252 |
| 74 | PVYCFTPSPVVVGTTDRS | SEQ ID NO:1253 |
| 75 | SPVVVGTTDRSGAPTYSW | SEQ ID NO:1254 |
| 76 | TDRSGAPTYSWGANDTDV | SEQ ID NO:1255 |
| 77 | TYSWGANDTDVFVLNNTR | SEQ ID NO:1256 |
| 78 | DTDVFVLNNTRPPLGNWF | SEQ ID NO:1257 |
| 79 | NNTRPPLGNWFGCTWMNS | SEQ ID NO:1258 |
| 80 | GNWFGCTWMNSTGFTKVC | SEQ ID NO:1259 |
| 81 | WMNSTGFTKVCGAPPCVI | SEQ ID NO:1260 |
| 82 | TKVCGAPPCVIGGVGNNT | SEQ ID NO:1261 |
| 83 | PCVIGGVGNNTLLCPTDC | SEQ ID NO:1262 |
| 84 | GNNTLLCPTDCFRKHPEA | SEQ ID NO:1263 |
| 85 | PTDCFRKHPEATYSRCGS | SEQ ID NO:1264 |
| 86 | HPEATYSRCGSGPWITPR | SEQ ID NO:1265 |
| 87 | RCGSGPWITPRCMVDYPY | SEQ ID NO:1266 |
| 88 | ITPRCMVDYPYRLWHYPC | SEQ ID NO:1267 |
| 89 | DYPYRLWHYPCTINYTIF | SEQ ID NO:1268 |
| 90 | HYPCTINYTIFKVRMYVG | SEQ ID NO:1269 |
| 91 | YTIFKVRNYVGGVEHRbE | SEQ ID NO:1270 |
| 92 | MYVGGVEHRLEAACNWTR | SEQ ID NO:1271 |
| 93 | HRLEAACNWTRGERCDLE | SEQ ID NO:1272 |
| 94 | NWTRGERCDLEDRDRSEL | SEQ ID NO:1273 |
| 95 | CDLEDRDRSELSPLLLST | SEQ ID NO:1274 |
| 96 | RSELSPLLLSTTQWQVLP | SEQ ID NO:1275 |
| 97 | LLSTTQWQVLPCSFTTLP | SEQ ID NO:1276 |
| 98 | QVLPCSFTTLPALSTGLI | SEQ ID NO:1277 |
| 99 | TTLPALSTGLIHLHQNIV | SEQ ID NO:1278 |
| 100 | TGLIHLHQNIVDVQYLYG | SEQ ID NO:1279 |
| 101 | QNIVDVQYLYGVGSSIAS | SEQ ID NO:1280 |
| 102 | YLYGVGSSIASWAIKWEY | SEQ ID NO:1281 |
| 103 | SIASWAIKWEYVVLLFLL | SEQ ID NO:1282 |
| 104 | KWEYVVLLFLLLAPARVC | SEQ ID NO:1283 |
| 105 | LFLLLADARVCSCLWMML | SEQ ID NO:1284 |
| 106 | ARVCSCLWMMLLISQAEA | SEQ ID NO:12B5 |
| 107 | WMMLLISQAEAALENLVI | SEQ ID NO:1286 |
| 108 | QAEAALENLVILNAASLA | SEQ ID NO:1287 |
| 109 | NLVILNAASLAGTHGLVS | SEQ ID NO:1288 |
| 110 | ASLAGTHGLVSFLVFFCF | SEQ ID NO:1289 |
| 111 | GLVSFLVFFCFAWYLKGR | SEQ ID NO:1290 |
| 112 | FFCFAWYLKGRWVPGAVY | SEQ ID NO:1291 |
| 113 | LKGRWVPGAVYAFYGMWP | SEQ ID NO:1292 |
| 114 | GAVYAFYGMWPLLLLLLA | SEQ ID NO:1293 |
| 115 | GMWPLLLLLLALPQRAYA | SEQ ID NO:1294 |
| 116 | LLLALPQRAYALDTEVAA | SEQ ID NO:1295 |
| 117 | RAYALDTEVAASCGGVVL | SEQ ID NO:1296 |
| 118 | EVAASCGGVVLVGLMALT | SEQ ID NO:1297 |
| 119 | GVVLVGLMALTLSPYYKR | SEQ ID NO:1298 |
| 120 | MALTLSPYYKRYISWCMW | SEQ ID NO:1299 |
| 121 | YYKRYISWCMWWLQYFLT | SEQ ID NO:1300 |
| 122 | WCMWWLQYFLTRVEAQLH | SEQ ID NO:1301 |
| 123 | YFLTRVEAQLHVWVPPLN | SEQ ID NO:1302 |
| 124 | AQLHVWVPPLNVRGGRDA | SEQ ID NO:1303 |
| 125 | PPLNVRGGRDAVILLMCV | SEQ ID NO:1304 |
| 126 | GRDAVILLMCVVHPTLVF | SEQ ID NO:1305 |
| 127 | LMCVVHPTLVFDITKLLL | SEQ ID NO:1306 |
| 128 | TLVFDITKLLLAIFGPLW | SEQ ID NO:1307 |
| 129 | KLLLAIFGPLWILQASLL | SEQ ID NO:1308 |
| 130 | GPLWILQASLLKVPYFVR | SEQ ID NO:1309 |
| 131 | ASLLKVPYFVRVQGLLRI | SEQ ID NO:1310 |
| 132 | YFVRVQGLLRICALARKI | SEQ ID NO:1311 |
| 133 | LLRICALARKIAGGHYVQ | SEQ ID NO:1312 |
| 134 | ARKIAGGRYVQMAIIKLG | SEQ ID NO:1313 |
| 135 | HYVQMAIIKLGALTGTYV | SEQ ID NO:1314 |
| 136 | IKLGALTGTYVYNHLTPL | SEQ ID NO:1315 |
| 137 | GTYVYNHLTPLRDWAHNG | SEQ ID NO:1316 |
| 138 | LTPLRDWAHNGLRDLAVA | SEQ ID NO:1317 |
| 139 | AHNGLRDLAVAVEPVVFS | SEQ ID NO:1318 |
| 140 | LAVAVEPVVFSRNETKLI | SEQ ID NO:1319 |
| 141 | VVFSRMETKLITWGADTA | SEQ ID NO:1320 |
| 142 | TKLITWGADTAACGDIIN | SEQ ID NO:1321 |
| 143 | ADTAACGDIINGLPVSAR | SEQ ID NO:1322 |
| 144 | DIINGLPVSARRGQEILL | SEQ ID NO:1323 |
| 145 | VSARRGQEILLGPADGMV | SEQ ID NO:1324 |
| 146 | EILLGPADGMVSKGWRLL | SEQ ID NO:1325 |
| 147 | DGMVSKGWRLLAPITAYA | SEQ ID NO:1326 |
| 148 | WRLLAPITAYAQQTRGLL | SEQ ID NO:1327 |
| 149 | TAYAQQTRGLLGCIITSL | SEQ ID NO:1328 |
| 150 | RGLLGCIITSLTGRDKNQ | SEQ ID NO:1329 |
| 151 | ITSLTGRDKNQVEGEVQI | SEQ ID NO:1330 |
| 152 | DKNQVEGEVQIVSTATQT | SEQ ID NO:1331 |
| 153 | EVQIVSTATQTFLAT | SEQ ID NO:1332 |
| 154 | VSTATQTFLATCIN | SEQ ID NO:1333 |
| 155 | ATQTFLATCINGVCWTVY | SEQ ID NO:1334 |
| 156 | TCINGVCWTVYRGAGTRT | SEQ ID NO:1335 |
| 157 | WTVYHGAGTRTIASPKGP | SEQ ID NO:1336 |
| 158 | GTRTIASPKGPVIQMYTN | SEQ ID NO:1337 |
| 159 | PKGPVIQMYTNVDQDLVG | SEQ ID NO:1338 |
| 160 | MYTNVDQDLVGWPAPQGS | SEQ ID NO:1339 |
| 161 | DLVGWPAPQGSRSLTPCT | SEQ ID NO:1340 |
| 162 | PQGSRSLTPCTCGSSDLY | SEQ ID NO:1341 |
| 163 | TPCTCGSSDLYLVTRHAD | SEQ ID NO:1342 |
| 164 | SDLYLVTRHADVIPVRRR | SEQ ID NO:1343 |
| 165 | RHADVIPVRRRGDSRGSL | SEQ ID NO:1344 |
| 166 | VRRRGDSRGSLLSPRPIS | SEQ ID NO:1345 |
| 167 | RGSLLSPRPISYLKGSSG | SEQ ID NO:1346 |
| 168 | RPISYLKGSSGGPLLCPA | SEQ ID NO:1347 |
| 169 | GSSGGPLLCPAGHAVGLF | SEQ ID NO:1348 |
| 170 | LCPAGHAVGLFRAAVCTR | SEQ ID NO:1349 |
| 171 | VGLFRAAVCTRGVAKAVD | SEQ ID NO:1350 |
| 172 | VCTRGVAKAVDFIPVENL | SEQ ID NO:1351 |
| 173 | KAVDFIPVENLETTMRSP | SEQ ID NO:1352 |
| 174 | VENLETTMRSPVFTDNSS | SEQ ID NO:1353 |
| 175 | MRSPVFTDNSSPPAVPQS | SEQ ID NO:1354 |
| 176 | DNSSPPAVPQSFQVAHLH | SEQ ID NO:1355 |
| 177 | VPQSFQVAHLEAPTGSGK | SEQ ID NO:1356 |
| 178 | ARLHAPTGSGKSTKVPAA | SEQ ID NO:1357 |
| 179 | GSGKSTKVPAAYAAQGYK | SEQ ID NO:1358 |
| 180 | VPAAYAAQGYKVLVLNPS | SEQ ID NO:1359 |
| 181 | QGYKVLVLNPSVAATLGF | SEQ ID NO:1360 |
| 182 | LNPSVAATLGFGAYMSKA | SEQ ID NO:1361 |
| 183 | TLGFGAYMSKAHGVDPNI | SEQ ID NO:1362 |
| 184 | MSKAHGVDPNIRTGVRTI | SEQ ID NO:1363 |
| 185 | DPNIRTGVRTITTGSPIT | SEQ ID NO:1364 |
| 186 | VRTITTGSPITYSTYGKF | SEQ ID NO:1365 |
| 187 | SPITYSTYGKFLADGGCS | SEQ ID NO:1366 |
| 188 | YGKFLADGGCSGGAYDII | SEQ ID NO:1367 |
| 189 | GGCSGGAYDIIICDECHS | SEQ ID NO:1368 |
| 190 | YDIIICDECHSTDATSIL | SEQ ID NO:1369 |
| 191 | ECHSTDATSILGIGTVLD | SEQ ID NO:1370 |
| 192 | TSILGIGTVLDQAETAGA | SEQ ID NO:1371 |
| 193 | TVLDQAETAGARLVVLAT | SEQ ID NO:1372 |
| 194 | TAOARLVVLATATPPGSV | SEQ ID NO:1373 |
| 195 | VLATATPPGSVTVSHPNI | SEQ ID NO:1374 |
| 196 | PGSVTVSHPNIEEVALST | SEQ ID NO:1375 |
| 197 | HPNIEEVALSTTGEIPFY | SEQ ID NO:1376 |
| 198 | ALSTTGEIPFYGKAIPLE | SEQ ID NO:1377 |
| 199 | IPFYGKAIPLEVIKGGRH | SEQ ID NO:1378 |
| 200 | IPLEVIKGGRXLIFCHSK | SEQ ID NO:1379 |
| 201 | GGRILIFCHSKKKCDELA | SEQ ID NO:1380 |
| 202 | CHSKKKCDELAAKLVALG | SEQ ID NO:1381 |
| 203 | DELAAKLVALGINAVAYY | SEQ ID NO:1382 |
| 204 | VALGINAVAYYRGLDVSV | SEQ ID NO:1383 |
| 205 | VAYYRGLDVSVIPTSGDV | SEQ ID NO:1384 |
| 206 | DVSVIPTSGDVVVVSTDA | SEQ ID NO:1385 |
| 207 | SGDVVVVSTDALMTGFTG | SEQ ID NO:1386 |
| 208 | STDALMTGFTGDFDSVID | SEQ ID NO:1387 |
| 209 | GFTGDFDSVIDCNTCVTQ | SEQ ID NO:1388 |
| 210 | SVIDCNTCVTQTVDFSLD | SEQ ID NO:1389 |
| 211 | CVTQTVDFSLDPTFTIET | SEQ ID NO:1390 |
| 212 | FSLDPTFTIETTTLPQDA | SEQ ID NO:1391 |
| 213 | TIETTTLPQDAVSRTQRR | SEQ ID NO:1392 |
| 214 | PQDAVSRTQRRGRTGRGK | SEQ ID NO:1393 |
| 215 | TQRRGRTGRGKPGIYRFV | SEQ ID NO:1394 |
| 216 | GRGKPGIYRFVAPGERPS | SEQ ID NO:1395 |
| 217 | YPFVAPGERPSGMFDSSV | SEQ ID NO:1396 |
| 218 | ERPSGMFDSSVLCECYDA | SEQ ID NO:1397 |
| 219 | DSSVLCECYDAGCAWYEL | SEQ ID NO:1398 |
| 220 | CYDAGCAWYELTPAE | SEQ ID NO:1399 |
| 221 | GCAWYELTPAETTV | SEQ ID NO:1400 |
| 222 | WYELTPAETTVRLRAYMN | SEQ ID NO:1401 |
| 223 | ETTVRLRAYMNTPGLPVC | SEQ ID NO:1402 |
| 224 | AYNNTPGLPVCQDHLEFW | SEQ ID NO:1403 |
| 225 | LPVCQDHLEFWEGVFTGL | SEQ ID NO:1404 |
| 226 | LEFWEGVFTGLTHIDAHF | SEQ ID NO:1405 |
| 227 | FTGLTHIDAHFLSQTKQS | SEQ ID NO:1406 |
| 228 | DAEFLSQTKQSGENFPYL | SEQ ID NO:1407 |
| 229 | TKQSGENFPYLVAYQATV | SEQ ID NO:1408 |
| 230 | FPYLVAYQATVCARAQAP | SEQ ID NO:1409 |
| 231 | QATVCARAQAPPPSWDQM | SEQ ID NO:1410 |
| 232 | AQAPPPSWDQMWKCLIRL | SEQ ID NO:1411 |
| 233 | WDQMWKCLIRLKPTLHGP | SEQ ID NO:1412 |
| 234 | LIRLKPTLHGPTPLLYRL | SEQ ID NO:1413 |
| 235 | LHGPTPLLYRLGAVQNEV | SEQ ID NO:1414 |
| 236 | LYRLGAVQNEVTLTHPIT | SEQ ID NO:1415 |
| 237 | QNEVTLTHPITKYIMTCM | SEQ ID NO:1416 |
| 238 | HPITKYIMTCMSADLEVV | SEQ ID NO:1417 |
| 239 | MTCMSADLEVVTST | SEQ ID NO:1418 |
| 240 | TSTWVLVGGVLAAL | SEQ ID NO:1419 |
| 241 | WVLVGGVLAALAAYCLST | SEQ ID NO:1420 |
| 242 | LAALAAYCLSTGCVV | SEQ ID NO:1421 |
| 243 | AAYCLSTGCVVIVG | SEQ ID NO:1422 |
| 244 | CLSTGCVVIVGRIVL | SEQ ID NO:1423 |
| 245 | GCVVIVGRIVLSGK | SEQ ID NO:1424 |
| 246 | VIVGRIVLSGKPAIIPDR | SEQ ID NO:1425 |
| 247 | LSGKPAIIPDREVLYQEF | SEQ ID NO:1426 |
| 248 | IPDREVLYQEFDEMEECS | SEQ ID NO:1427 |
| 249 | YQEFDEMEECSQHLPYIE | SEQ ID NO:1428 |
| 250 | EECSQHLPYIEQGMMLAE | SEQ ID NO:1429 |
| 251 | PYIEQGMMLAEQFKQKAL | SEQ ID NO:1430 |
| 252 | MLAEQFKQKALGLLQTAS | SEQ ID NO:1431 |
| 253 | QKALGLLQTASRQAEVIT | SEQ ID NO:1432 |
| 254 | QTASRQAEVITPAVQTNW | SEQ ID NO:1433 |
| 255 | EVITPAVQTNWQKLEVFW | SEQ ID NO:1434 |
| 256 | QTNWQKLEVFWAXHMWNF | SEQ ID NO:1435 |
| 257 | EVFWAKHMWNFISGIQYL | SEQ ID NO:1436 |
| 258 | MWNFISGIQYLAGLSTLP | SEQ ID NO:1437 |
| 259 | IQYLAGLSTLPGNPAIAS | SEQ ID NO:1438 |
| 260 | STLPGNPAIASLMAFTAA | SEQ ID NO:1439 |
| 261 | AIASLMAFTAAVTSPLTT | SEQ ID NO:1440 |
| 262 | FTAAVTSPLTTGQTLLFN | SEQ ID NO:1441 |
| 263 | PLTTGQTLLFNILGGWVA | SEQ ID NO:1442 |
| 264 | LLFNILGGWVAAQLAAPG | SEQ ID NO:1443 |
| 265 | GWVAAQLAAPGAATAEVG | SEQ ID NO:1444 |
| 266 | AAPGAATAFVGAGLAGAA | SEQ ID NO:1445 |
| 267 | AFVGAGLAGAAIGSVGLG | SEQ ID NO:1446 |
| 268 | AGAAIGSVGLGKVLVDIL | SEQ ID NO:1447 |
| 269 | VGLGKVLVDILAGYGAGV | SEQ ID NO:1448 |
| 270 | VDILAGYGAGVAGALVAF | SEQ ID NO:1449 |
| 271 | GAGVAGALVAFKIMSGEV | SEQ ID NO:1450 |
| 272 | LVAFKIMSGEVPSTEDLV | SEQ ID NO:1451 |
| 273 | SGEVPSTEDLVNLLPAIL | SEQ ID NO:1452 |
| 274 | EDLVNLLPAILSPGALVV | SEQ ID NO:1453 |
| 275 | PAILSPGALVVGVVCAAI | SEQ ID NO:1454 |
| 276 | ALVVGVVCAAILRRHVGP | SEQ ID NO:1455 |
| 277 | CAAILRRHVGPGEGAVQW | SEQ ID NO:1456 |
| 278 | HVGPGEGAVQWMNRLIAF | SEQ ID NO:1457 |
| 279 | AVQWMNRLIAFASRGNHV | SEQ ID NO:1458 |
| 280 | LIAFASRGNHVSPTHYVP | SEQ ID NO:1459 |
| 281 | GNHVSPTHYVPESDAAAR | SEQ ID NO:1460 |
| 282 | HYVPESDAAARVTAILSS | SEQ ID NO:1461 |
| 283 | AAARVTAILSSLTVTQLL | SEQ ID NO:1462 |
| 284 | ILSSLTVTQLLRRLHQWI | SEQ ID NO:1463 |
| 285 | TQLLRRLHQWISSECTTP | SEQ ID NO:1464 |
| 286 | HQWISSECTTPCSGSWLR | SEQ ID NO:1465 |
| 287 | CTTPCSGSWLRDIWDWIC | SEQ ID NO:1466 |
| 288 | SWLRDIWDWICEVLSDFK | SEQ ID NO:1467 |
| 289 | DWICEVLSDFKTWLKAKL | SEQ ID NO:1468 |
| 290 | SDFKTWLKAKLMPQLPGI | SEQ ID NO:1469 |
| 291 | KAKLMPQLPGIPFVSCQR | SEQ ID NO:1470 |
| 292 | LPGIPFVSCQRGYRGVWR | SEQ ID NO:1471 |
| 293 | SCQRGYRGVWRGDGIMHT | SEQ ID NO:1472 |
| 294 | GVWRGDGIMHTRCHCGAE | SEQ ID NO:1473 |
| 295 | IMHTRCHCGAEITGHVKN | SEQ ID NO:1474 |
| 296 | CGASITGHVKNGTMRIVG | SEQ ID NO:1475 |
| 297 | HVKNGTMRIVGPRTCRNM | SEQ ID NO:1476 |
| 298 | RIVGPRTCRNMWSGTFPI | SEQ ID NO:1477 |
| 299 | CRNMWSGTFPINAYTTGP | SEQ ID NO:1478 |
| 300 | TFPINAYTTGPCTPLPAP | SEQ ID NO:1479 |
| 301 | TTGPCTPLPAPNYKFALW | SEQ ID NO:1480 |
| 302 | LPAPNYKFALWRVSAEEY | SEQ ID NO:1481 |
| 303 | FALNRVSAEEYVEIRRVG | SEQ ID NO:1482 |
| 304 | AEEYVEIRRVGDFHYVSG | SEQ ID NO:1483 |
| 305 | RRVGDFHYVSGMTTDNLK | SEQ ID NO:1484 |
| 306 | YVSGMTTDNLKCPCQIPS | SEQ ID NO:1485 |
| 307 | DNLKCPCQIPSPEFFTEL | SEQ ID NO:1486 |
| 308 | QIPSPEFFTELDGVRLHR | SEQ ID NO:1487 |
| 309 | FTELDGVRLHRFAPPCKP | SEQ ID NO:1488 |
| 310 | RLHRFAPPCKPLLREEVS | SEQ ID NO:1489 |
| 311 | PCKPLLREEVSFRVGLHE | SEQ ID NO:1490 |
| 312 | EEVSFRVGLHEYPVGSQL | SEQ ID NO:1491 |
| 313 | GLHEYPVGSQLPCEPEPD | SEQ ID NO:1492 |
| 314 | GSQLPCEPEPDVAVLTSM | SEQ ID NO:1493 |
| 315 | PEPDVAVLTSMLTDPSHI | SEQ ID NO:1494 |
| 316 | LTSMLTDPSHITAEAAGR | SEQ ID NO:1495 |
| 317 | PSHITAEAAGRRLARGSP | SEQ ID NO:1496 |
| 318 | AAGRRLARGSPPSMASSS | SEQ ID NO:1497 |
| 319 | RGSPPSMASSSASQLSAP | SEQ ID NO:1498 |
| 320 | ASSSASQLSAPSLKATCT | SEQ ID NO:1499 |
| 321 | LSAPSLKATCTANHDSPD | SEQ ID NO:1500 |
| 322 | ATCTANHDSPDAELIEAN | SEQ ID NO:1501 |
| 323 | DSPDAELIEANLLWRQEM | SEQ ID NO:1502 |
| 324 | IEANLLWRQEMGGNITRV | SEQ ID NO:1503 |
| 325 | RQEMGGNITRVESENKVV | SEQ ID NO:1504 |
| 326 | ITRVESENKVVILDSFDP | SEQ ID NO:1505 |
| 327 | NKVVILDSFDPLVAEEDE | SEQ ID NO:1506 |
| 328 | SFDPLVAEEDEREVSVPA | SEQ ID NO:1507 |
| 329 | EEDEREVSVPAEILRKSR | SEQ ID NO:1508 |
| 330 | SVPAEILRKSRRFARALP | SEQ ID NO:1509 |
| 331 | RKSRRFARALPVWARPDY | SEQ ID NO:1510 |
| 332 | RALPVWARPDYNPPLVET | SEQ ID NO:1511 |
| 333 | RPDYNPPLVETWKKPDYE | SEQ ID NO:1512 |
| 334 | LVETWKKPDYEPPVVHGC | SEQ ID NO:1513 |
| 335 | PDYEPPVVHGCPLPPPRS | SEQ ID NO:1514 |
| 336 | VHGCPLPPPRSPPVPPPR | SEQ ID NO:1515 |
| 337 | PPRSPPVPPPRKKRTVVL | SEQ ID NO:1516 |
| 338 | PPPRKKRTVVLTESTLST | SEQ ID NO:1517 |
| 339 | TVVLTESTLSTALAELAT | SEQ ID NO:1518 |
| 340 | TLSTALAELATKSFGSSS | SEQ ID NO:1519 |
| 341 | ELATKSFGSSSTSGITGD | SEQ ID NO:1520 |
| 342 | GSSSTSGITGDNTTTSSE | SEQ ID NO:1521 |
| 343 | ITGDNTTTSSEPAPSGCP | SEQ ID NO:1522 |
| 344 | TSSEPAPSGCPPDSDVES | SEQ ID NO:1523 |
| 345 | SGCPPDSDVESYSSM | SEQ ID NO:1524 |
| 346 | PDSDVESYSSMPPL | SEQ ID NO:1525 |
| 347 | DVESYSSMPPLEGEPGDP | SEQ ID NO:1526 |
| 348 | MPPLEGEPGDPDLSDGSW | SEQ ID NO:1527 |
| 349 | PGDPDLSDGSWSTVSSGA | SEQ ID NO:1528 |
| 350 | DGSWSTVSSGADTED | SEQ ID NO:1529 |
| 351 | TVSSGADTEDVVC | SEQ ID NO:1530 |
| 352 | SSGAPTEDVVCCSMS | SEQ ID NO:1531 |
| 353 | DTEDVVCCSMSYSW | SEQ ID NO:1532 |
| 354 | DVVCCSMSYSWTGAL | SEQ ID NO:1533 |
| 355 | CSMSYSWTGALVTP | SEQ ID NO:1534 |
| 356 | SYSWTGALVTPCAAEEQK | SEQ ID NO:1535 |
| 357 | LVTPCAAEEQKLPINALS | SEQ ID NO:1536 |
| 358 | EEQKLPINALSNSLLRHH | SEQ ID NO:1537 |
| 359 | NALSNSLLRHHNLVYSTT | SEQ ID NO:1538 |
| 360 | LRHHNLVYSTTSRSACQR | SEQ ID NO:1539 |
| 361 | YSTTSRSACQRQKKVTFD | SEQ ID NO:1540 |
| 362 | ACQRQKKVTFDRLQVLDS | SEQ ID NO:1541 |
| 363 | VTFDRLQVLDSHYQDVLK | SEQ ID NO:1542 |
| 364 | VLDSHYQDVLKEVKAAAS | SEQ ID NO:1543 |
| 365 | DVLKEVKAAASKVKANLL | SEQ ID NO:1544 |
| 366 | AAASKVKANLLSVEEACS | SEQ ID NO:1545 |
| 367 | ANLLSVEEACSLTPPHSA | SEQ ID NO:1546 |
| 368 | EACSLTPPHSAKSKYGYG | SEQ ID NO:1547 |
| 369 | PHSAKSKFGYGAKDVRCH | SEQ ID NO:1548 |
| 370 | FGYGAKDVRCHARKAVAH | SEQ ID NO:1549 |
| 371 | VRCHARKAVAHINSVWKD | SEQ ID NO:1550 |
| 372 | AVAHINSVWKDLLEDSVT | SEQ ID NO:1551 |
| 373 | VWKDLLEDSVTPIDTTIM | SEQ ID NO:1552 |
| 374 | DSVTPIDTTIMAKNEVFC | SEQ ID NO:1553 |
| 375 | TTIMAKNEVFCVQPEKGG | SEQ ID NO:1554 |
| 376 | EVFCVQPEKGGRKPARLI | SEQ ID NO:1555 |
| 377 | EKGGRKPARLIVFPDLGV | SEQ ID NO:1556 |
| 378 | ARLIVFPDLGVRVCEKMA | SEQ ID NO:1557 |
| 379 | DLGVRVCEKMALYDVVSK | SEQ ID NO:1558 |
| 380 | EKMALYDVVSKLPLAVMG | SEQ ID NO:1559 |
| 381 | VVSKLPLAVMGSSYGFQY | SEQ ID NO:1560 |
| 382 | AVMGSSYGFQYSPGQRVE | SEQ ID NO:1561 |
| 383 | GFQYSPGQRVEFLVQAWK | SEQ ID NO:1562 |
| 384 | QRVEFLVQAWKSKKTPMG | SEQ ID NO:1563 |
| 385 | QAWKSKKTPMGFSYDTRC | SEQ ID NO:1564 |
| 386 | TPMGFSYDTRCFDSTVTE | SEQ ID NO:1565 |
| 387 | DTRCFDSTVTESDIRTEE | SEQ ID NO:1566 |
| 388 | TVTESDIRTEEAIYQCCD | SEQ ID NO:1567 |
| 389 | RTEEAIYQCCDLDPQARV | SEQ ID NO:1568 |
| 390 | QCCDLDPQARVAIKSLTE | SEQ ID NO:1569 |
| 391 | QARVAIKSLTERLYVGGP | SEQ ID NO:1570 |
| 392 | SLTERLYVGGPLTNSRGE | SEQ ID NO:1571 |
| 393 | VGGPLTNSRGENCGYRRC | SEQ ID NO:1572 |
| 394 | SRGENCGYRRCRASGVLT | SEQ ID NO:1573 |
| 395 | YRRCRASGVLTTSCGNTL | SEQ ID NO:1574 |
| 396 | GVLTTSCGNTLTCYIKAR | SEQ ID NO:1575 |
| 397 | GNTLTCYIKARAACRAAG | SEQ ID NO:1576 |
| 398 | IKARAACRAAGLQDCTML | SEQ ID NO:1577 |
| 399 | RAAGLQDCTMLVCGDDLV | SEQ ID NO:1578 |
| 400 | CTMLVCGDDLVVICESAG | SEQ ID NO:1579 |
| 401 | DDLVVICESAGVQEDAAS | SEQ ID NO:1580 |
| 402 | ESAGVQEDAASLRAFTEA | SEQ ID NO:1581 |
| 403 | DAASLRAFTEAMTRYSAP | SEQ ID NO:1582 |
| 404 | FTEAMTRYSAPPGDPPQP | SEQ ID NO:1583 |
| 405 | YSAPPGDPPQPEYDLELI | SEQ ID NO:1584 |
| 406 | PPQPEYDLELITSCSSNV | SEQ ID NO:1585 |
| 407 | LELITSCSSNVSVAHDGA | SEQ ID NO:1586 |
| 408 | SSNVSVAHDGAGKRVYYL | SEQ ID NO:1587 |
| 409 | HDGAGKRVYYLTRDPTTP | SEQ ID NO:1588 |
| 410 | VYYLTRDPTTPLARAAWE | SEQ ID NO:1589 |
| 411 | PTTPLARAAWETARHTPV | SEQ ID NO:1590 |
| 412 | AAWETARHTPVNSWLGNI | SEQ ID NO:1591 |
| 413 | HTPVNSWLGNIIMFAPTL | SEQ ID NO:1592 |
| 414 | LGNIIMFAPTLWARMILM | SEQ ID NO:1593 |
| 415 | APTLWARMILMTHFFSVL | SEQ ID NO:1594 |
| 416 | MILMTHFFSVLIARDQLE | SEQ ID NO:1595 |
| 417 | FSVLIARDQLEQALNCEI | SEQ ID NO:1596 |
| 418 | DQLEQALLCEIYGACYSI | SEQ ID NO:1597 |
| 419 | NCEIYGACYSIEPLD | SEQ ID NO:1598 |
| 420 | YGACYSIEPLDLPP | SEQ ID NO:1599 |
| 421 | CYSIEPLDLPPIIQRLHG | SEQ ID NO:1600 |
| 422 | DLPPIIQRLHGLSAFSLH | SEQ ID NO:1601 |
| 423 | RLHGLSAFSLHSYSPGEI | SEQ ID NO:1602 |
| 424 | FSLHSYSPGEINRVAACL | SEQ ID NO:1603 |
| 425 | PGEINRVAACLRKLGVPP | SEQ ID NO:1604 |
| 426 | AACLRKLGVPPLRAWRHR | SEQ ID NO:1605 |
| 427 | GVPPLRAWRHRARSVRAR | SEQ ID NO:1606 |
| 428 | WRRRARSVRARLLSRGGR | SEQ ID NO:1607 |
| 429 | VRARLLSRGGRAAICGKY | SEQ ID NO:1608 |
| 430 | RGGRAAICGKYLFNWAVR | SEQ ID NO:1609 |
| 431 | CGKYLFNWAVRTKLKLTP | SEQ ID NO:1610 |
| 432 | WAVRTKLKLTPIAAAGRL | SEQ ID NO:1611 |
| 433 | KLTPIAAAGRLDLSGWFT | SEQ ID NO:1612 |
| 434 | AGRLDLSGWFTAGYSGGD | SEQ ID NO:1613 |
| 435 | GWFTAGYSGGDIYHSVSH | SEQ ID NO:1614 |
| 436 | SGGDIYESVSHARPRWFW | SEQ ID NO:1615 |
| 437 | SVSHARPRWFWFCLLLLA | SEQ ID NO:1616 |
| 438 | RWFWFCLLLLAAGVG | SEQ ID NO:1617 |
| 439 | FCLLLLAAGVGIYL | SEQ ID NO:1618 |
| 440 | LLLAAGVGIYLLPNR | SEQ ID NO:1619 |

[0199] TABLE 14

One embodiment of overlapping 15-mer
peptides spanning all proteins of HBV.
Genotype A was chosen as the initial HBV
strains. Where significant variability
in the HBV genome is observed between
Genotype A and Genotypes B-D, additional
peptides were designed so that the
complete set will induce responses to
all Genotypes of HBV. Where particular T
cell epitopes have been mapped to
minimal epitopes, these are also
included in the peptide set, to most
optimally induce these epitope specific
responses. Breakdown of sequences: 1-394
Genotype A sequences-all genes-(Total of
394 peptides); 395-543 Genotypes B/C/D-
corresponding to significant variability
from Genotype A-(Total of 149 peptides);
and 544-564 Known Epitopes (Total of 21
peptides)

| | | |
|---|---|---|
| # | PEPTIDE | SEQUENCE ID |

| | | |
|---|---|---|
| 1 | MGGWSSKPRKGMGTN | SEQ ID NO:1620 |
| 2 | SSKPRKGMGTNLSVP | SEQ ID NO:1621 |
| 3 | RKGMGTNLSVPNPLG | SEQ ID NO:1622 |
| 4 | GTNLSVPNPLGFFPD | SEQ ID NO:1623 |
| 5 | SVPNPLGFFPDHQLD | SEQ ID NO:1624 |
| 6 | PLGFFPDHQLDPAFG | SEQ ID NO:1625 |
| 7 | FPDHQLDPAFGANSN | SEQ ID NO:1626 |
| 8 | QLDPAFGANSNNPDW | SEQ ID NO:1627 |
| 9 | AFGANSNNPDWDFNP | SEQ ID NO:1628 |
| 10 | NSNNPDWDFNPIRDH | SEQ ID NO:1629 |
| 11 | PDWDFNPIKDHWPAA | SEQ ID NO:1630 |
| 12 | FNPIKDHWPAANQVG | SEQ ID NO:1631 |
| 13 | KDHWPAANQVGVGAP | SEQ ID NO:1632 |
| 14 | PAANQVGVGAFGPGL | SEQ ID NO:1633 |
| 15 | QVGVGAFGPGLTPPH | SEQ ID NO:1634 |
| 16 | GAFGPGLTPPHGGIL | SEQ ID NO:1635 |
| 17 | PGLTPPHGGILGWSP | SEQ ID NO:1636 |
| 18 | PPHGGILGWSPQAQG | SEQ ID NO:1637 |
| 19 | GILGWSPQAQGILTT | SEQ ID NO:1638 |
| 20 | WSPQAQGILTTVSTI | SEQ ID NO:1639 |
| 21 | AQGILTTVSTIPPPA | SEQ ID NO:1640 |
| 22 | LTTVSTIPPPASTNR | SEQ ID NO:1641 |
| 23 | STIPPPASTNRQSGR | SEQ ID NO:1642 |
| 24 | PPASTNRQSGRQPTP | SEQ ID NO:1643 |
| 25 | TNRQSGRQPTPISPP | SEQ ID NO:1644 |
| 26 | SGRQPTPISPPTRDS | SEQ ID NO:1645 |
| 27 | PTPISPPLRDSHPQA | SEQ ID NO:1646 |
| 28 | SPPLRDSEPQAMQWN | SEQ ID NO:1647 |
| 29 | RDSHPQAMQWNSTAF | SEQ ID NO:1648 |
| 30 | PQAMQWNSTAFHQAL | SEQ ID NO:1649 |
| 31 | QWNSTAFHQALQDPR | SEQ ID NO:1650 |
| 32 | TAFHQALQDPRVRGL | SEQ ID NO:1651 |
| 33 | QALQDPRVRGLYLPA | SEQ ID NO:1652 |
| 34 | DPRVRGLYLPAGGSS | SEQ ID NO:1653 |
| 35 | RGLYLPAGGSSSGTV | SEQ ID NO:1654 |
| 36 | LPAGGSSSGTVNPAP | SEQ ID NO:1655 |
| 37 | GSSSGTVNPAPNIAS | SEQ ID NO:1656 |
| 38 | GTVNPAPNIASHISS | SEQ ID NO:1657 |
| 39 | PAPNIASHISSISAR | SEQ ID NO:1658 |
| 40 | IASHISSISARTGDP | SEQ ID NO:1659 |
| 41 | ISSISARTGDPVTNN | SEQ ID NO:1660 |
| 42 | SARTGDPVTNMENIT | SEQ ID NO:1661 |
| 43 | GDPVTNMENITSGFL | SEQ ID NO:1662 |
| 44 | TNMENITSGFLGPLL | SEQ ID NO:1663 |
| 45 | NITSGFLGPLLVLQA | SEQ ID NO:1664 |
| 46 | GFLGPLLVLQAGFFL | SEQ ID NO:1665 |
| 47 | PLLVLQAGFFLLTRI | SEQ ID NO:1666 |
| 48 | LQAGFFLLTRILTIP | SEQ ID NO:1667 |
| 49 | FFLLTRILTIPQSLD | SEQ ID NO:1668 |
| 50 | TRILTIPQSLDSWWT | SEQ ID NO:1669 |
| 51 | TIPQSLDSWWTSLNF | SEQ ID NO:1670 |
| 52 | SLDSWWTSLNFLGGS | SEQ ID NO:1671 |
| 53 | WWTSLNFLGGSPVCL | SEQ ID NO:1672 |
| 54 | LNFLGGSPVCLGQNS | SEQ ID NO:1673 |
| 55 | GGSPVCLGQNSQSPT | SEQ ID NO:1674 |
| 56 | VCLGQNSQSPTSNHS | SEQ ID NO:1675 |
| 57 | QNSQSPTSNHSPTSC | SEQ ID NO:1676 |
| 58 | SPTSNHSPTSCPPIC | SEQ ID NO:1677 |
| 59 | NHSPTSCPPICPGYR | SEQ ID NO:1678 |
| 60 | TSCPPICPGYRWMCL | SEQ ID NO:1679 |
| 61 | PICPGYRWMCLRRFI | SEQ ID NO:1680 |
| 62 | GYRWMCLRRFIIFLF | SEQ ID NO:1681 |
| 63 | MCLRRFIIFLFILLL | SEQ ID NO:1682 |
| 64 | RFIIFLFILLLCLIF | SEQ ID NO:1683 |
| 65 | FLFILLLCLIFLLVL | SEQ ID NO:1684 |
| 66 | LLLCLIFLLVLLDYQ | SEQ ID NO:1685 |
| 67 | LIFLLVLLDYQGMLP | SEQ ID NO:1686 |
| 68 | LVLLDYQGMLPVCPL | SEQ ID NO:1687 |
| 69 | DYQGMLPVCPLIPGS | SEQ ID NO:1688 |
| 70 | MLPVCPLIPGSTTTS | SEQ ID NO:1689 |
| 71 | CPLIPGSTTTSTGPC | SEQ ID NO:1690 |
| 72 | PGSTTTSTGPCKTCT | SEQ ID NO:1691 |
| 73 | TTSTGPCKTCTTPAQ | SEQ ID NO:1692 |
| 74 | GPCKTCTTPAQGNSM | SEQ ID NO:1693 |
| 75 | TCTTPAQGNSMFPSC | SEQ ID NO:1694 |
| 76 | PAQGNSMFPSCCCTK | SEQ ID NO:1695 |
| 77 | NSMFPSCCCTKPTDG | SEQ ID NO:1696 |
| 78 | PSCCCTKPTDGNCTC | SEQ ID NO:1697 |
| 79 | CTKPTDGNCTCIPIP | SEQ ID NO:1698 |
| 80 | TDGNCTCIPIPSSWA | SEQ ID NO:1699 |
| 81 | CTCIPIPSSWAFAKY | SEQ ID NO:1700 |
| 82 | PIPSSWAFAKYLWEW | SEQ ID NO:1701 |
| 83 | SWAFAKYLWEWASVR | SEQ ID NO:1702 |
| 84 | AKYLWEWASVRFSWL | SEQ ID NO:1703 |
| 85 | WEWASVRFSWLSLLV | SEQ ID NO:1704 |
| 86 | SVRFSWLSLLVPFVQ | SEQ ID NO:1705 |
| 87 | SWLSLLVPFVQWFVG | SEQ ID NO:1706 |
| 88 | LLVPFVQWFVGLSPT | SEQ ID NO:1707 |
| 89 | FVQWFVGLSPTVWLS | SEQ ID NO:1708 |
| 90 | FVGLSPTVWLSAIWM | SEQ ID NO:1709 |
| 91 | SPTVWLSAIWMMWYW | SEQ ID NO:1710 |
| 92 | WLSAIWMMWYWGPSL | SEQ ID NO:1711 |
| 93 | IWNMWYWGPSLYSIV | SEQ ID NO:1712 |
| 94 | WYWGPSLYSIVSPFI | SEQ ID NO:1713 |
| 95 | PSLYSIVSPFIPLLP | SEQ ID NO:1714 |
| 96 | SIVSPFIPLLPIFFC | SEQ ID NO:1715 |
| 97 | PFIPLLPIFFCLWVY | SEQ ID NO:1716 |
| 98 | FIPLLPIFFCLWVYI | SEQ ID NO:1717 |
| 99 | MAARLYCQLDPSRDV | SEQ ID NO:1718 |
| 100 | LYCQLDPSRDVLCLR | SEQ ID NO:1719 |
| 101 | LDPSRDVLCLRPVGA | SEQ ID NO:1720 |
| 102 | RDVLCLRPVGAESRG | SEQ ID NO:1721 |
| 103 | CLRPVGAESRGRPLS | SEQ ID NO:1722 |
| 104 | VGAESRGRPLSGPLG | SEQ ID NO:1723 |
| 105 | SRGRPLSGPLGTLSS | SEQ ID NO:1724 |
| 106 | PLSGPLGTLSSPSPS | SEQ ID NO:1725 |
| 107 | PLGTLSSPSPSAVPA | SEQ ID NO:1726 |
| 108 | LSSPSPSAVPADHGA | SEQ ID NO:1727 |
| 109 | SPSAVPADHGAHLSL | SEQ ID NO:1728 |
| 110 | VPADHGAHLSLRGLP | SEQ ID NO:1729 |
| 111 | HGARLSLRGLPVCAF | SEQ ID NO:1730 |
| 112 | LSLRGLPVCAFSSAG | SEQ ID NO:1731 |
| 113 | GLPVCAFSSAGPCAL | SEQ ID NO:1732 |
| 114 | CAFSSAGPCALRFTS | SEQ ID NO:1733 |
| 115 | SAGPCALRFTSARCM | SEQ ID NO:1734 |
| 116 | CALRFTSARCMETTV | SEQ ID NO:1735 |
| 117 | FTSARCMETTVNAHQ | SEQ ID NO:1736 |
| 118 | RCMETTVNAHQILPK | SEQ ID NO:1737 |
| 119 | TTVNAHQILPKVLHK | SEQ ID NO:1738 |
| 120 | AHQILPKVLHKRTLG | SEQ ID NO:1739 |
| 121 | LPKVLHRKRTGLPAM | SEQ ID NO:1740 |
| 122 | LHKRTLGLPAMSTTD | SEQ ID NO:1741 |
| 123 | TLGLPAMSTTDLEAY | SEQ ID NO:1742 |
| 124 | PANSTTDLEAYFKDC | SEQ ID NO:1743 |
| 125 | TTDLEAYFKDCVFKD | SEQ ID NO:1744 |
| 126 | EAYFKDCVFKDWEEL | SEQ ID NO:1745 |
| 127 | KDCVFKDWEELGEEI | SEQ ID NO:1746 |
| 128 | FKDWEELGEEIRLMI | SEQ ID NO:1747 |
| 129 | EELGEEIRLMIFVLG | SEQ ID NO:1748 |
| 130 | EEIRLMIFVLGGCRH | SEQ ID NO:1749 |
| 131 | LMIFVLGGCRHKLVC | SEQ ID NO:1750 |
| 132 | VLGGCRHKLVCAPAP | SEQ ID NO:1751 |
| 133 | CRHKLVCAPAPCNFF | SEQ ID NO:1752 |
| 134 | KLVCAPAPCNPFTSA | SEQ ID NO:1753 |
| 135 | MPLSYQHFRKLLLLD | SEQ ID NO:1754 |
| 136 | YQHFRKLLLLDDGTE | SEQ ID NO:1755 |
| 137 | RKLLLLDDGTEAGPL | SEQ ID NO:1756 |
| 138 | LLDDGTEAGPLEEEL | SEQ ID NO:1757 |
| 139 | GTEAGPLEEELPRLA | SEQ ID NO:1758 |
| 140 | GPLEEELPRLADADL | SEQ ID NO:1759 |
| 141 | EELPRLADADLNRRV | SEQ ID NO:1760 |
| 142 | RLADADLNRRVAEDL | SEQ ID NO:1761 |
| 143 | ADLNRRVAEDLNLGN | SEQ ID NO:1762 |
| 144 | RRVAEDLNLGNLNVS | SEQ ID NO:1763 |
| 145 | EDLNLGNLNVSIPWT | SEQ ID NO:1764 |
| 146 | LGNLNVSIPWTHKVG | SEQ ID NO:1765 |
| 147 | NVSIPWTHKVGNFTG | SEQ ID NO:1766 |
| 148 | PWTHKVGNFTGLYSS | SEQ ID NO:1767 |
| 149 | KVGNFTGLYSSTVPI | SEQ ID NO:1768 |
| 150 | FTGLYSSTVPIFNPE | SEQ ID NO:1769 |
| 151 | YSSTVPIFNPEWQTP | SEQ ID NO:1770 |
| 152 | VPIFNPEWQTPSFPK | SEQ ID NO:1771 |
| 153 | NPEWQTPSFPKIHLQ | SEQ ID NO:1772 |
| 154 | QTPSFPKIHLQEDII | SEQ ID NO:1773 |
| 155 | FPKIHLQEDIINRCQ | SEQ ID NO:1774 |
| 156 | HLQEDIINRCQQFVG | SEQ ID NO:1775 |
| 157 | DIINRCQQFVGPLTV | SEQ ID NO:1776 |
| 158 | RCQQFVGPLTVNEKR | SEQ ID NO:1777 |
| 159 | PVGPLTVNEKRRLKL | SEQ ID NO:1778 |
| 160 | LTVNEKRRLKLIMPA | SEQ ID NO:1779 |
| 161 | EKRRLKLIMPARFYP | SEQ ID NO:1780 |
| 162 | LKLIMPARFYPTTKY | SEQ ID NO:1781 |
| 163 | MPARFYPTTKYLPLD | SEQ ID NO:1782 |
| 164 | FYPTTKYLPLDKGIK | SEQ ID NO:1783 |
| 165 | TKYLPLDKGIKPYYP | SEQ ID NO:1784 |
| 166 | PLDKGIKPYYPDQVV | SEQ ID NO:1785 |
| 167 | GIKPYYPDQVVNHYF | SEQ ID NO:1786 |
| 168 | YYPDQVVNHYFQTRH | SEQ ID NO:1787 |
| 169 | QVVNHYFQTRRYLHT | SEQ ID NO:1788 |
| 170 | HYFQTRHYLHTLWKA | SEQ ID NO:1789 |
| 171 | TRHYLHTLWKAGILY | SEQ ID NO:1790 |
| 172 | LHTLWKAGILYKRET | SEQ ID NO:1791 |
| 173 | WKAGILYKRETTRSA | SEQ ID NO:1792 |
| 174 | ILYKRETTRSASFCG | SEQ ID NO:1793 |
| 175 | RETTRSASFCGSPYS | SEQ ID NO:1794 |
| 176 | RSASFCGSPYSWEQE | SEQ ID NO:1795 |
| 177 | PCGSPYSWEQELQHG | SEQ ID NO:1796 |
| 178 | PYSWEQELQHGRLVI | SEQ ID NO:1797 |
| 179 | EQELQHGRLVIKTSQ | SEQ ID NO:1798 |
| 180 | QHGRLVIKTSQRHGD | SEQ ID NO:1799 |
| 181 | LVIKTSQRHGDESFC | SEQ ID NO:1800 |
| 182 | TSQRHGDESPCSQPS | SEQ ID NO:1801 |
| 183 | HGDESFCSQPSGILS | SEQ ID NO:1802 |
| 184 | SFCSQPSGILSRSSV | SEQ ID NO:1803 |
| 185 | QPSGILSRSSVGPCI | SEQ ID NO:1804 |
| 186 | ILSRSSVGPCIRSQL | SEQ ID NO:1805 |
| 187 | SSVGPCIRSQLKQSR | SEQ ID NO:1806 |
| 188 | PCIRSQLKQSRLGLQ | SEQ ID NO:1807 |
| 189 | SQLKQSRLGLQPHQG | SEQ ID NO:1808 |
| 190 | QSRLGLQPHQGPLAS | SEQ ID NO:1809 |
| 191 | GLQPHQGPLASSQPG | SEQ ID NO:1810 |
| 192 | HQGPLASSQPGRSGS | SEQ ID NO:1811 |
| 193 | LASSQPGRSGSIRAR | SEQ ID NO:1812 |
| 194 | QPGRSGSIRARAHPS | SEQ ID NO:1813 |
| 195 | SGSIRARAHPSTRRY | SEQ ID NO:1814 |
| 196 | RAPAEPSTRRYFGVE | SEQ ID NO:1815 |
| 197 | HPSTRRYFGVEPSGS | SEQ ID NO:1816 |
| 198 | RRYFGVEPSGSGHID | SEQ ID NO:1817 |
| 199 | GVEPSGSGHIDESVN | SEQ ID NO:1818 |
| 200 | SGSGHIDHSVNNSSS | SEQ ID NO:1819 |
| 201 | HIDHSVNNSSSCLHQ | SEQ ID NO:1820 |
| 202 | SVNNSSSCLHQSAVR | SEQ ID NO:1821 |
| 203 | SSSCLHQSAVRKAAY | SEQ ID NO:1822 |
| 204 | LHQSAVRKAAYSHLS | SEQ ID NO:1823 |
| 205 | AVRKAAYSHLSTSKR | SEQ ID NO:1824 |
| 206 | AAYSHLSTSKRQSSS | SEQ ID NO:1825 |
| 207 | HLSTSKRQSSSGHAV | SEQ ID NO:1826 |
| 208 | SKRQSSSGHAVEFHC | SEQ ID NO:1827 |
| 209 | SSSGRAVEFHCLPPS | SEQ ID NO:1828 |
| 210 | HAVEFHCLPPSSAGS | SEQ ID NO:1829 |
| 211 | FHCLPPSSAGSQSQG | SEQ ID NO:1830 |
| 212 | PPSSAGSQSQGSVSS | SEQ ID NO:1831 |
| 213 | AGSQSQGSVSSCWWL | SEQ ID NO:1832 |
| 214 | SQGSVSSCWWLQFRN | SEQ ID NO:1833 |
| 215 | VSSCWWLQFRNSKPC | SEQ ID NO:1834 |
| 216 | WWLQFRNSKPCSEYC | SEQ ID NO:1835 |
| 217 | FRNSKPCSEYCLSHL | SEQ ID NO:1836 |
| 218 | KPCSEYCLSHLVNLR | SEQ ID NO:1837 |
| 219 | EYCLSHLVNLREDWG | SEQ ID NO:1838 |
| 220 | SHLVNLREDWGPCDE | SEQ ID NO:1839 |
| 221 | NLREDWGPCDEHGEH | SEQ ID NO:1840 |
| 222 | DWGPCDEHGEHHIRI | SEQ ID NO:1841 |
| 223 | CDEHGEHHIRIPRTP | SEQ ID NO:1842 |
| 224 | GEHRIRIPRTPARVT | SEQ ID NO:1843 |
| 225 | IRIPRTPARVTGGVF | SEQ ID NO:1844 |
| 226 | RTPARVTGGVFLVDK | SEQ ID NO:1845 |
| 227 | RVTGGVFLVDKMPHN | SEQ ID NO:1846 |
| 228 | GVFLVDKNPHNTAES | SEQ ID NO:1847 |
| 229 | VDKNPHNTAESRLVV | SEQ ID NO:1848 |
| 230 | PHNTAESRLVVDFSQ | SEQ ID NO:1849 |
| 231 | AESRLVVDFSQPSRG | SEQ ID NO:1850 |
| 232 | LVVDFSQFSRGITRV | SEQ ID NO:1851 |
| 233 | FSQFSRGITRVSWPK | SEQ ID NO:1852 |
| 234 | SRGITRVSWPKFAVP | SEQ ID NO:1853 |
| 235 | TRVSWPKFAVPNLQS | SEQ ID NO:1854 |
| 236 | WPKFAVPNLQSLTNL | SEQ ID NO:1855 |
| 237 | AVPNLQSLTNLLSSN | SEQ ID NO:1856 |
| 238 | LQSLTNLLSSNLSWL | SEQ ID NO:1857 |
| 239 | TNLLSSNLSWLSLDV | SEQ ID NO:1858 |
| 240 | SSNLSWLSLDVSAAF | SEQ ID NO:1859 |
| 241 | SWLSLDVSAAFYHIP | SEQ ID NO:1860 |
| 242 | LDVSAAFYEIPLHPA | SEQ ID NO:1861 |
| 243 | AAFYHIPLHPAAMPH | SEQ ID NO:1862 |
| 244 | HIPLHPAAMPHLLIG | SEQ ID NO:1863 |
| 245 | HPAAMPHLLIGSSGL | SEQ ID NO:1864 |
| 246 | MPHLLIGSSGLSRYY | SEQ ID NO:1865 |
| 247 | LIGSSGLSRYVARLS | SEQ ID NO:1866 |
| 248 | SGLSRYVARLSSNSR | SEQ ID NO:1867 |
| 249 | RYVARLSSNSRINNN | SEQ ID NO:1868 |
| 250 | RLSSNSRINNNQYGT | SEQ ID NO:1869 |
| 251 | NSRINNNQYGTMQNL | SEQ ID NO:1870 |
| 252 | NNNQYGTMQNLHDSC | SEQ ID NO:1871 |
| 253 | YGTMQNLHDSCSRQL | SEQ ID NO:1872 |
| 254 | QNLHDSCSRQLYVSL | SEQ ID NO:1873 |
| 255 | DSCSRQLYVSLMLLY | SEQ ID NO:1874 |
| 256 | RQLYVSLMLLYKTYG | SEQ ID NO:1875 |
| 257 | VSLNLLYKTYGWKLH | SEQ ID NO:1876 |
| 258 | LLYKTYGWKLRLYSH | SEQ ID NO:1877 |
| 259 | TYGWKLHLYSHPIVL | SEQ ID NO:1878 |
| 260 | KLHLYSHPIVLGFRK | SEQ ID NO:1879 |
| 261 | YSHPIVLGFRRIPMG | SEQ ID NO:1880 |
| 262 | IVLGFRKIPMGVGLS | SEQ ID NO:1881 |
| 263 | FRKIPNGVGLSPFLL | SEQ ID NO:1882 |
| 264 | PMGVGLSPFLLAQFT | SEQ ID NO:1883 |
| 265 | GLSPFLLAQFTSAIC | SEQ ID NO:1884 |
| 266 | FLLAQFTSAICSVVR | SEQ ID NO:1885 |
| 267 | QFTSAICSVVRRAFP | SEQ ID NO:1886 |
| 268 | AICSVVRRAFPHCLA | SEQ ID NO:1887 |
| 269 | VVRRAFPHCLAFSYM | SEQ ID NO:1888 |
| 270 | AFPHCLAFSYMDDVV | SEQ ID NO:1889 |
| 271 | CLAFSYMDDVVLGAK | SEQ ID NO:1890 |
| 272 | SYMDDVVLGAKSVQH | SEQ ID NO:1891 |
| 273 | DVVLGAKSVQHRESL | SEQ ID NO:1892 |
| 274 | GAKSVQHRESLYTAV | SEQ ID NO:1893 |
| 275 | VQHRESLYTAVTNPL | SEQ ID NO:1894 |
| 276 | ESLYTAVTNFLLSLG | SEQ ID NO:1895 |
| 277 | TAVTNFLLSLGIHLN | SEQ ID NO:1896 |
| 278 | NFLLSLGIHLNPNKT | SEQ ID NO:1897 |
| 279 | SLGIHLNPNKTKRWG | SEQ ID NO:1898 |
| 280 | ELNPNKTKRWGYSLN | SEQ ID NO:1899 |
| 281 | NKTKRWGYSLNFMGY | SEQ ID NO:1900 |
| 282 | RWGYSLNFMGYIIGS | SEQ ID NO:1901 |
| 283 | SLNFMGYIIGSWGTL | SEQ ID NO:1902 |
| 284 | MGYIIGSWGTLPQDH | SEQ ID NO:1903 |
| 285 | IGSWGTLPQDEIVQK | SEQ ID NO:1904 |
| 286 | GTLPQDHIVQKIKHC | SEQ ID NO:1905 |
| 287 | QDHIVQKIKHCFRKL | SEQ ID NO:1906 |
| 288 | VQKIKHCFRKLPVNR | SEQ ID NO:1907 |
| 289 | KHCFRKLPVNRPIDW | SEQ ID NO:1908 |
| 290 | RKLPVNRPIDWKVCQ | SEQ ID NO:1909 |
| 291 | VNRPIDWKVCQRIVG | SEQ ID NO:1910 |
| 292 | IDWKVCQRIVGLLGF | SEQ ID NO:1911 |
| 293 | VCQRIVGLLGFAAPF | SEQ ID NO:1912 |
| 294 | IVGLLGFAAPDTQCG | SEQ ID NO:1913 |
| 295 | LGFAAPFTQCGYPAL | SEQ ID NO:1914 |
| 296 | APFTQCGYPALMPLY | SEQ ID NO:1915 |
| 297 | QCGYPALMPLYACIQ | SEQ ID NO:1916 |
| 298 | PALMPLYACIQAKQA | SEQ ID NO:1917 |
| 299 | PLYACIQAKQAFTFS | SEQ ID NO:1918 |
| 300 | CIQAKQAFTFSPTYK | SEQ ID NO:1919 |
| 301 | KQAFTFSPTYKAPLS | SEQ ID NO:1920 |
| 302 | TFSPTYKAFLSKQYM | SEQ ID NO:1921 |
| 303 | TYKAFLSKQYMNLYP | SEQ ID NO:1922 |
| 304 | FLSKQYMNLYPVARQ | SEQ ID NO:1923 |
| 305 | QYMNLYPVARQRPGL | SEQ ID NO:1924 |
| 306 | LYPVARQRPGLCQVF | SEQ ID NO:1925 |
| 307 | ARQRPGLCQVFADAT | SEQ ID NO:1926 |
| 308 | PGLCQVFADATPTGW | SEQ ID NO:1927 |
| 309 | QVFADATPTGWGLAI | SEQ ID NO:1928 |
| 310 | DATPTGWGLAIGHQR | SEQ ID NO:1929 |
| 311 | TGWGLAIGHQRMRGT | SEQ ID NO:1930 |
| 312 | LAIGHQRMRGTFVAP | SEQ ID NO:1931 |
| 313 | HQRMRGTFVAPLPIH | SEQ ID NO:1932 |
| 314 | RGTFVAPLPIHTAEL | SEQ ID NO:1933 |
| 315 | VAPLPIHTAELLAAC | SEQ ID NO:1934 |
| 316 | PIHTAELLAACPARS | SEQ ID NO:1935 |
| 317 | AELLAACFARSRSGA | SEQ ID NO:1936 |
| 318 | AACFARSRSGAKLIG | SEQ ID NO:1937 |
| 319 | ARSRSGAKLIGTDNS | SEQ ID NO:1938 |
| 320 | SGAKLIGTDNSVVLS | SEQ ID NO:1939 |
| 321 | LIGTDNSVVLSRIYT | SEQ ID NO:1940 |
| 322 | DNSVVLSRKYTSPPW | SEQ ID NO:1941 |
| 323 | VLSRKYTSFPWLLGC | SEQ ID NO:1942 |
| 324 | KYTSFPWLLGCTANW | SEQ ID NO:1943 |
| 325 | FPWLLGCTANWILRG | SEQ ID NO:1944 |
| 326 | LGCTANWILRGTSFV | SEQ ID NO:1945 |
| 327 | ANWILRGTSFVYVPS | SEQ ID NO:1946 |
| 328 | LRGTSFVYVPSALNP | SEQ ID NO:1947 |
| 329 | SFVYVPSALNPADDP | SEQ ID NO:1948 |
| 330 | VPSALNPADDPSRGR | SEQ ID NO:1949 |
| 331 | LNPADDPSRGRLGLS | SEQ ID NO:1950 |
| 332 | DDPSRGRLGLSRPLL | SEQ ID NO:1951 |
| 333 | RGRLGLSRPLLRLPF | SEQ ID NO:1952 |
| 334 | GLSRPLLRLPFQPTT | SEQ ID NO:1953 |
| 335 | PLLRLPFQPTTGRTS | SEQ ID NO:1954 |
| 336 | LPFQPTTGRTSLYAV | SEQ ID NO:1955 |
| 337 | PTTGRTSLYAVSPSV | SEQ ID NO:1956 |
| 338 | RTSLYAVSPSVPSHL | SEQ ID NO:1957 |
| 339 | YAVSPSVPSHLPVRV | SEQ ID NO:1958 |
| 340 | PSVPSHLPVRVHFAS | SEQ ID NO:1959 |
| 341 | SHLPVRVHFASPLHV | SEQ ID NO:1960 |
| 342 | VRVHFASPLHVAWRP | SEQ ID NO:1961 |
| 343 | RVHFASPLHVAWRPP | SEQ ID NO:1962 |
| 344 | MQLFHLCLIISCTCP | SEQ ID NO:1963 |
| 345 | HLCLIISCTCPTVQA | SEQ ID NO:1964 |
| 346 | IISCTCPTVQASKLC | SEQ ID NO:1965 |
| 347 | TCPTVQASKLCLGWL | SEQ ID NO:1966 |
| 348 | VQASKLCLGWLWGMD | SEQ ID NO:1967 |
| 349 | KLCLGWLWGMDIDPY | SEQ ID NO:1968 |
| 350 | GWLWGMDIDPYKEFG | SEQ ID NO:1969 |
| 351 | GMDIDPYKEFGATVE | SEQ ID NO:1970 |
| 352 | DPYKEFGATVELLSF | SEQ ID NO:1971 |
| 353 | EFGATVELLSFLPSD | SEQ ID NO:1972 |
| 354 | TVELLSFLPSDFFPS | SEQ ID NO:1973 |
| 355 | LSFLPSDFFPSVRDL | SEQ ID NO:1974 |
| 356 | PSDFFPSVRDLLDTA | SEQ ID NO:1975 |
| 357 | FPSVRDLLDTASALY | SEQ ID NO:1976 |
| 358 | RDLLDTASALYREAL | SEQ ID NO:1977 |
| 359 | DTASALYREALESPE | SEQ ID NO:1978 |
| 360 | ALYREALESPEHCSP | SEQ ID NO:1979 |
| 361 | EALESPERCSPHHTA | SEQ ID NO:1980 |
| 362 | SPEHCSPHHTALRQA | SEQ ID NO:1981 |
| 363 | CSPHHTALRQAILCW | SEQ ID NO:1982 |
| 364 | HTALRQAILCWGELM | SEQ ID NO:1983 |
| 365 | RQAILCWGELMTLAT | SEQ ID NO:1984 |
| 366 | LCWGELMTLATWVGN | SEQ ID NO:1985 |
| 367 | ELMTLATWVGNNLED | SEQ ID NO:1986 |
| 368 | LATWVGNNLEDPASR | SEQ ID NO:1987 |
| 369 | VGNNLEDPASRDLVV | SEQ ID NO:1988 |
| 370 | LEDPASRDLVVNYVN | SEQ ID NO:1989 |
| 371 | ASRDLVVNYVNTNMG | SEQ ID NO:1990 |
| 372 | LVVNYVNTNMGLKIR | SEQ ID NO:1991 |
| 373 | YVNTNMGLKIRQLLW | SEQ ID NO:1992 |
| 374 | NMGLKIRQLLWFHIS | SEQ ID NO:1993 |
| 375 | KIRQLLWFHISCLTF | SEQ ID NO:1994 |
| 376 | LLWFHISCLTFGRET | SEQ ID NO:1995 |
| 377 | HISCLTFGRETVLEY | SEQ ID NO:1996 |
| 378 | LTFGRETVLEYLVSF | SEQ ID NO:1997 |
| 379 | RETVLEYLVSFGVWI | SEQ ID NO:1998 |
| 380 | LEYLVSFGVWIRTPP | SEQ ID NO:1999 |
| 381 | VSFGVWIRTPPAYRP | SEQ ID NO:2000 |
| 382 | VWIRTPPAYRPPNAP | SEQ ID NO:2001 |
| 383 | TPPAYRPPNAPILST | SEQ ID NO:2002 |
| 384 | YRPPNAPILSTLPET | SEQ ID NO:2003 |
| 385 | NAPILSTLPETTVVR | SEQ ID NO:2004 |
| 386 | LSTLPETTVVRRRDR | SEQ ID NO:2005 |
| 387 | PETTVVRRRDRGRSP | SEQ ID NO:2006 |
| 388 | VVRRRDRGRSPRRRT | SEQ ID NO:2007 |
| 389 | RDRGRSPRRRTPSPR | SEQ ID NO:2008 |
| 390 | RSPRRRTPSPRRRRS | SEQ ID NO:2009 |
| 391 | RRTPSPRRRRSQSPR | SEQ ID NO:2010 |
| 392 | SPRRERSQSPRRRRS | SEQ ID NO:2011 |
| 393 | RRSQSPERRRSQSRE | SEQ ID NO:2012 |
| 394 | QSPRRRRSQSRESQC | SEQ ID NO:2013 |
| 395 | MGQNLSTSNPLGFFP | SEQ ID NO:2014 |
| 396 | LDPAFRANTANPDWD | SEQ ID NO:2015 |
| 397 | NPNKDTWPDANKVGA | SEQ ID NO:2016 |
| 398 | DTWPDANKVGAGAFG | SEQ ID NO:2017 |
| 399 | DWDFNPNKDTWPDAN | SEQ ID NO:2018 |
| 400 | NPNKDHWPEANQVGA | SEQ ID NO:2019 |
| 401 | DHWPEANQVGAGAFG | SEQ ID NO:2020 |
| 402 | DWDFNPNKDHWPEAN | SEQ ID NO:2021 |
| 403 | NPHKDNWPDANKVGV | SEQ ID NO:2022 |
| 404 | DNWPDANKVGVGAFG | SEQ ID NO:2023 |
| 405 | DWDLNPHKDNWPDAN | SEQ ID NO:2024 |
| 406 | QGILQTLPANPPPAS | SEQ ID NO:2025 |
| 407 | QTLPANPPPASTNRQ | SEQ ID NO:2026 |
| 408 | SPQAQGILQTLPANP | SEQ ID NO:2027 |
| 409 | QGILTTVPAAPPPAS | SEQ ID NO:2028 |
| 410 | QPTPISPPLRDTHPQ | SEQ ID NO:2029 |
| 411 | LSPPLRNTHPQAMQW | SEQ ID NO:2030 |
| 412 | NSTTFHQTLQDPRVR | SEQ ID NO:2031 |
| 413 | GTVNPVPTTASPISS | SEQ ID NO:2032 |
| 414 | PVPTTASPISSIPSR | SEQ ID NO:2033 |
| 415 | TASPISSIDSRIGDP | SEQ ID NO:2034 |
| 416 | ISSIFSRIGDPALNM | SEQ ID NO:2035 |
| 417 | PSRIGDPALNMENIT | SEQ ID NO:2036 |
| 418 | GDPALNMENITSGFL | SEQ ID NO:2037 |
| 419 | GTVSPAQNTVSAISS | SEQ ID NO:2038 |
| 420 | PAQNTVSAISSILSK | SEQ ID NO:2039 |
| 421 | TVSAISSILSKTGDP | SEQ ID NO:2040 |
| 422 | ISSILSKTGDPVPNM | SEQ ID NO:2041 |
| 423 | LSKTGDPVPNMENIA | SEQ ID NO:2042 |
| 424 | GDPVPNMENIASGLL | SEQ ID NO:2043 |
| 425 | NFLGGTTVCLGQNSQ | SEQ ID NO:2044 |
| 426 | LNFLGGAPTCPGQNS | SEQ ID NO:2045 |
| 427 | NSQSQISSHSPTCCP | SEQ ID NO:2046 |
| 428 | QISSHSPTOCPPICP | SEQ ID NO:2047 |
| 429 | PVCPLLPGTSTTSTG | SEQ ID NO:2048 |
| 430 | PSSWAFGKFLWEWAS | SEQ ID NO:2049 |
| 431 | PSSWAFARFLWEWAS | SEQ ID NO:2050 |
| 432 | WGPSLYSILSPFLPL | SEQ ID NO:2051 |
| 433 | WGPSLYNILSPFMPL | SEQ ID NO:2052 |
| 434 | AARVCCQLDPARDVL | SEQ ID NO:2033 |
| 435 | AARLCCQLDPARDVL | SEQ ID NO:2034 |
| 436 | RGRPLPGPLGALPPA | SEQ ID NO:2055 |
| 437 | LPGPLGALPPASPSA | SEQ ID NO:2056 |
| 438 | LGALPPASPSAVPSD | SEQ ID NO:2057 |
| 439 | RGRPVSGPFGPLPSP | SEQ ID NO:2058 |
| 440 | VSGPFGPLPSPSSSA | SEQ ID NO:2059 |
| 441 | FGPLPSPSSSAVPAD | SEQ ID NO:2060 |
| 442 | PSPSSSAVPADHGAH | SEQ ID NO:2061 |
| 443 | SPSAVPTDHGAHLSL | SEQ ID NO:2062 |
| 444 | TTVNAHRNLPKVLHK | SEQ ID NO:2063 |
| 445 | AYFKDCVFNEWEELG | SEQ ID NO:2064 |
| 446 | GEEIRLKVPVLGGCR | SEQ ID NO:2065 |
| 447 | LLLLDDEAGPLEEEL | SEQ ID NO:2066 |
| 448 | ELPRLADEGLNRRVA | SEQ ID NO:2067 |
| 449 | VPVFNPHWKTPSFPN | SEQ ID NO:2068 |
| 450 | NIHLHQDIIKKCEQF | SEQ ID NO:2069 |
| 451 | HQDIIKKCEQFVGPL | SEQ ID NO:2070 |
| 452 | IKKCEQFVGPLTVNE | SEQ ID NO:2071 |
| 453 | NIHLQEDIINRCQQY | SEQ ID NO:2072 |
| 454 | QEDIINRCQQYVGPL | SEQ ID NO:2073 |
| 455 | INRCQQYVGPLTVNE | SEQ ID NO:2074 |
| 456 | QQYVGPLTVNEKRRL | SEQ ID NO:2075 |
| 457 | DIHLQEDIVDRCKQF | SEQ ID NO:2076 |
| 458 | QEDIVDRCKQFVGPL | SEQ ID NO:2077 |
| 459 | VDRCKQFVGPLTVNE | SEQ ID NO:2078 |
| 460 | IKPYYPEHLVNHYFQ | SEQ ID NO:2079 |
| 462 | WEQELQHGAESFHQQ | SEQ ID NO:2080 |
| 462 | LQHGAESFHQQSSGI | SEQ ID NO:2081 |
| 463 | LQHGRLVFQTSTRHG | SEQ ID NO:2082 |
| 464 | RLVFQTSTRRGDESF | SEQ ID NO:2083 |
| 465 | QTSTRHGDESPCSQS | SEQ ID NO:2084 |
| 466 | RHGDESFCSQSSGIL | SEQ ID NO:2085 |
| 467 | SSGILSRPPVGSSLQ | SEQ ID NO:2086 |
| 468 | LSRPPVGSSLQSKHR | SEQ ID NO:2087 |
| 469 | PVGSSLQSKIRKSRL | SEQ ID NO:2088 |
| 470 | SLQSKHRKSRLGLQS | SEQ ID NO:2089 |
| 471 | KHRKSRLGLQSQQGH | SEQ ID NO:2090 |
| 472 | SRLGLQSQQGHLARP | SEQ ID NO:2091 |
| 473 | LQSQQGHLARRQQGR | SEQ ID NO:2092 |
| 474 | QGELARRQQGRSWSI | SEQ ID NO:2093 |
| 475 | ARRQQGRSWSIRAGF | SEQ ID NO:2094 |
| 476 | QGRSWSIPAGFHPTA | SEQ ID NO:2095 |
| 477 | WSIRAGFHPTARRPF | SEQ ID NO:2096 |
| 478 | AGFHPTARRPFGVEP | SEQ ID NO:2097 |
| 479 | PTARRPFGVEPSGSG | SEQ ID NO:2098 |
| 480 | RPFGVEPSGSGHTTN | SEQ ID NO:2099 |
| 481 | VEPSGSGHTTNFASK | SEQ ID NO:2100 |
| 482 | GSGHTTNFASKSASC | SEQ ID NO:2101 |
| 483 | TTNFASKSASCLYQS | SEQ ID NO:2102 |
| 484 | ASKSASCLYQSPVRK | SEQ ID NO:2103 |
| 485 | CIQSQLRKSRLGPQP | SEQ ID NO:2104 |
| 486 | TQGQLAGRPQGGSGS | SEQ ID NO:2105 |
| 487 | VEPSGSGHTHNCASS | SEQ ID NO:2106 |
| 488 | GSGHTHNCASSSSSC | SEQ ID NO:2107 |
| 489 | THNCASSSSSCLHQS | SEQ ID NO:2108 |
| 490 | LQPQQGSLARGKSGR | SEQ ID NO:2109 |
| 491 | QGSLARGKSGRSGSI | SEQ ID NO:2110 |
| 492 | ARGKSORSGSIRARV | SEQ ID NO:2111 |
| 493 | SGRSGSIRARVHPTT | SEQ ID NO:2112 |
| 494 | GSIRARVHPTTRRSF | SEQ ID NO:2113 |
| 495 | VEPSGSGHIDNSASS | SEQ ID NO:2114 |
| 496 | GSGHIDNSASSASSC | SEQ ID NO:2115 |
| 497 | IDNSASSASSCLHQS | SEQ ID NO:2116 |
| 498 | KAAYPSVSTFEKHSS | SEQ ID NO:2117 |
| 499 | PSVSTFEKHSSSGHA | SEQ ID NO:2118 |
| 500 | TFEKHSSSGHAVELH | SEQ ID NO:2119 |
| 501 | KAAYSPISTSKGHSS | SEQ ID NO:2120 |
| 502 | SPISTSKGHSSSGHA | SEQ ID NO:2122 |
| 503 | TSKGHSSSGHAVELH | SEQ ID NO:2122 |
| 504 | HAVELHNLPPNSARS | SEQ ID NO:2123 |
| 505 | LHNLPPNSARSQSER | SEQ ID NO:2124 |
| 506 | PPNSARSQSERPVFP | SEQ ID NO:2125 |
| 507 | ARSQSERPVFPCWWL | SEQ ID NO:2126 |
| 508 | SERPVFPCWWLQFRN | SEQ ID NO:2127 |
| 509 | VFPCWWLQFPNSKPC | SEQ ID NO:2128 |
| 510 | HAVELHHFPPNSSRS | SEQ ID NO:2129 |
| 511 | LRHFPPNSSRSQSQG | SEQ ID NO:2130 |
| 512 | PPNSSRSQSQGSVLS | SEQ ID NO:2131 |
| 513 | SRSQSQGSVLSCWWL | SEQ ID NO:2132 |
| 514 | SQGSVLSCWWLQFRN | SEQ ID NO:2133 |
| 515 | HAVELHNIPPSSARS | SEQ ID NO:2134 |
| 516 | LHNIPPSSARSQSEG | SEQ ID NO:2135 |
| 517 | PPSSARSQSEGPIFS | SEQ ID NO:2136 |
| 518 | ARSQSEGPIFSCWWL | SEQ ID NO:2137 |
| 519 | KPCSDYCLSHIVNLL | SEQ ID NO:2138 |
| 520 | DYCLSHIVNLLEDWG | SEQ ID NO:2139 |
| 521 | SHIVNLLEDWGPCAE | SEQ ID NO:2140 |
| 522 | SQFSRGNYRVSWPKF | SEQ ID NO:2141 |
| 523 | SQFSRGSTHVSWPKF | SEQ ID NO:2142 |
| 524 | STSRNINYQHGTMQD | SEQ ID NO:2143 |
| 525 | NINYQHGTMQDLHDS | SEQ ID NO:2144 |
| 526 | SNSRIINHQHGTMQN | SEQ ID NO:2145 |
| 527 | NLYVSLLLLYQTFGR | SEQ ID NO:2146 |
| 528 | SLLLLYQTFGRKLHL | SEQ ID NO:2147 |
| 529 | LYQTFGRKLHLYSHP | SEQ ID NO:2148 |
| 530 | FGRKLHLYSHPIILG | SEQ ID NO:2149 |
| 531 | SVQHLESLFTSITNF | SEQ ID NO:2150 |
| 532 | LESLFTSITNFLLSL | SEQ ID NO:2151 |
| 533 | FTSITNFLLSLGIHL | SEQ ID NO:2152 |
| 534 | YVIGCYGSLPQDHII | SEQ ID NO:2153 |
| 535 | CYGSLPQDHIIQKIK | SEQ ID NO:2154 |
| 536 | LPQDHIIQKIKECFR | SEQ ID NO:2155 |
| 537 | QEHIVLKIKQCFRKL | SEQ ID NO:2156 |
| 538 | YKAFLCKQYLNLYPV | SEQ ID NO:2157 |
| 539 | TPTGWGLVMGHQRMR | SEQ ID NO:2158 |
| 540 | RSRSGANILGTDNSV | SEQ ID NO:2159 |
| 541 | GRLGLSRPLLRLPFR | SEQ ID NO:2160 |
| 542 | GRLGLYRPLLHLPFR | SEQ ID NO:2161 |
| 543 | GRLGLYRPLLRLPYR | SEQ ID NO:2162 |
| 544 | FLPSDFFPSV | SEQ ID NO:2163 |
| 545 | VLQAGFFLL | SEQ ID NO:2164 |
| 546 | FLLTRILTI | SEQ ID NO:2165 |
| 547 | LLCLIFLLV | SEQ ID NO:2166 |
| 548 | LLDYQGMLPV | SEQ ID NO:2167 |
| 549 | WLSLLVPFV | SEQ ID NO:2168 |
| 550 | LLVPFVQWFV | SEQ ID NO:2169 |
| 551 | GLSPTVWLSV | SEQ ID NO:2170 |
| 552 | LLPIFFCLWV | SEQ ID NO:2171 |
| 553 | YLHTLWKAGI | SEQ ID NO:2172 |
| 554 | NLSWLSLDV | SEQ ID NO:2173 |
| 555 | GLSRYVARL | SEQ ID NO:2174 |
| 556 | KLHLYSHPI | SEQ ID NO:2175 |
| 557 | LLAQFTSAI | SEQ ID NO:2176 |
| 558 | YMDDVVLGA | SEQ ID NO:2177 |
| 559 | YVDDVVLGA | SEQ ID NO:2178 |
| 560 | YIDDVVLGA | SEQ ID NO:2179 |
| 561 | FLLSLGIHL | SEQ ID NO:2180 |
| 562 | ALMPLYACI | SEQ ID NO:2181 |
| 563 | WILRGTSFV | SEQ ID NO:2182 |
| 564 | ILRGTSFVYV | SEQ ID NO:2183 |

### BIBLIOGRAPHY

[0200] 1. Piot, P., et al., The global impact of HIV/AIDS. Nature, 2001. 410(6831): p. 968-73.
[0201] 2. UNAIDS, Global estimates of HIV/AIDS epidemic as of end 2002. 2003, UNAIDS.
[0202] 3. Borrow, P., et al., Virus-specific CD8+ cytotoxic T-lymphocyte activity associated with control of viremia in primary human immunodeficiency virus type 1 infection. J Virol, 1994. 68(9): p. 6103-10.
[0203] 4. Koup, R. A., et al., Temporal association of cellular immune responses with the initial control of viremia in primary human immunodeficiency virus type 1 syndrome. J Virol, 1994. 68(7): p. 4650-5.
[0204] 5. Musey, L., et al., Cytotoxic-T-cell responses, viral load, and disease progression in early human immunodeficiency virus type 1 infection. N Engl J Med, 1997. 337(18): p. 1267-74.
[0205] 6. Ogg, G. S., et al., Quantitation of HIV-1-specific cytotoxic T lymphocytes and plasma load of viral RNA. Science, 1998. 279(5359): p. 2103-6.
[0206] 7. Carmichael, A., et al., Quantitative analysis of the human immunodeficiency virus type 1 (HIV-1)-specific cytotoxic T lymphocyte (CTL) response at different stages of HIV-1 infection: differential CTL responses to HIV-1 and Epstein- Barr virus in late disease. J Exp Med, 1993. 177(2): p. 249-56.
[0207] 8. Rinaldo, C., et al., High levels of anti-human immunodeficiency virus type 1 (HIV-1) memory cytotoxic T-lymphocyte activity and low viral load are associated with lack of disease in HIV-1-infected long-term nonprogressors. J Virol, 1995. 69(9): p. 583842.
[0208] 9. Hay, C. M., et al., Lack of viral escape and defective in vivo activation of human immunodeficiency virus type 1-specific cytotoxic T lymphocytes in rapidly progressive infection. J Virol, 1999. 73(7): p. 5509-19.
[0209] 10. Johnson, P. R., et al., Inactivated whole SIV vaccine in macaques: evaluation of protective efficacy against challenge with cell-free virus or infected cells. AIDS Res Hum Retroviruses, 1992. 8(8): p. 1501-5.
[0210] 11. Cranage, M. P., et al., Studies on the specificity of the vaccine effect elicited by inactivated simian immunodeficiency virus. AIDS Res Hum Retroviruses, 1993. 9(1): p. 13-22.
[0211] 12. Luke, W., et al., Simian immunodeficiency virus (SIV) gp130 oligomers protect rhesus macaques (Macaca mulatta) against the infection with SIVmac32H grown on T-cells or derived ex vivo. Virology, 1996. 216(2): p. 444-50.
[0212] 13. Mooij, P., et al., A clinically relevant HIV-1 subunit vaccine protects rhesus macaques from in vivo passaged simian-human immunodeficiency virus infection. Aids, 1998.12(5): p. F15-22.
[0213] 14. VaxGen, I., VaxGen Announces Initial Results of its Phase III AIDS Vaccine Trial. 2003, PR Newswire.
[0214] 15. Kent, S. J., et al., Vaccination with attenuated simian immunodeficiency virus by DNA inoculation. J Virol, 2001. 75(23): p. 11930-4.
[0215] 16. Kent, S. J., et al., Enhanced T-cell immunogenicity and protective efficacy of a human immunodeficiency virus type 1 vaccine regimen consisting of consecutive priming with DNA and boosting with recombinant fowlpox virus. J Virol, 1998. 72(12): p. 10180-8.
[0216] 17. Santra, S., et al., Prior vaccination increases the epitopic breadth of the cytotoxic T-lymphocyte response that evolves in rhesus monkeys following a simian- human immunodeficiency virus infection. J Virol, 2002. 76(12): p. 6376-81.
[0217] 18. Estcourt, M. J., et al., Prime-boost immunization generates a high frequency, high-avidity CD8(+) cytotoxic T lymphocyte population. Int Immunol, 2002. 14(1): p. 31-7.
[0218] 19. Marzo, A. L., et al., Tumor-specific CD4+ T cells have a major “post-licensing” role in CTL mediated anti-tumor immunity. J Immunol, 2000. 165(11): p. 6047-55.
[0219] 20. Nelson, D. J., et al., Tumor progression despite efficient tumor antigen cross-presentation and effective “arming” of tumor antigen-specific CTL. J Immunol, 2001. 166(9): p. 5557-66.
[0220] 21. Ritchie, D. S., et al., Dendritic cell elimination as an assay of cytotoxic T lymphocyte activity in vivo. Immunol Methods, 2000. 246(1-2): p. 109-17.
[0221] 22. Carbone, F. R. and M. J. Bevan, Induction of ovalbumin-specific cytotoxic T cells by in vivo peptide immunization. J Exp Med, 1989. 169(3): p. 603-12.
[0222] 23. Carbone, F. R., et al., Induction of cytotoxic T lymphocytes by primary in vitro stimulation with peptides. J Exp Med, 1988. 167(6): p. 1767-79.
[0223] 24. Kast, W. M., et al., Protection against lethal Sendai virus infection by in vivo priming of virus-specific cytotoxic T lymphocytes with a free synthetic peptide. Proc Natl Acad Sci U S A, 1991. 88(6): p. 2283-7.
[0224] 25. Schulz, M., R. M. Zinkernagel, and H. Hengartner, Peptide-induced antiviral protection by cytotoxic T cells. Proc Natl Acad Sci U S A, 1991.88(3): p.991-3.
[0225] 26. Feltkamp, M. C., et al., Vaccination with cytotoxic T lymphocyte epitope-containing peptide protects against a tumor induced by human papillomavirus type 16-transformed cells. Eur J Immunol, 1993. 23(9): p. 2242-9.
[0226] 27. Celluzzi, C. M., et al., Peptide-pulsed dendritic cells induce antigen-specific CTL-mediated protective tumor immunity. J Exp Med, 1996. 183(1): p. 283-7.
[0227] 28. Kearney, E. R., et al., Visualization of peptide-specific T cell immunity and peripheral tolerance induction in vivo. Immunity, 1994. 1(4): p. 327-39.
[0228] 29. Aichele, P., et al., T cell priming versus T cell tolerance induced by synthetic peptides. J Exp Med, 1995. 182(1): p. 261-6.
[0229] 30. Toes, R. E., et al., Enhanced tumor outgrowth after peptide vaccination. Functional deletion of tumor-specific CTL induced by peptide vaccination can lead to the inability to reject tumors. J Immunol, 1996.156(10): p. 3911-8.
[0230] 31. Toes, R. E., et al., Peptide vaccination can lead to enhanced tumor growth through specific T-cell tolerance induction. Proc Natl Acad Sci U S A, 1996. 93(15): p. 7855-60.
[0231] 32. Dale, C. J., et al., Chimeric human papilloma virus-simian/human immunodeficiency virus virus-like-particle vaccines: immunogenicity and protective efficacy in macaques. Virology, 2002. 301(1): p. 176-87.
[0232] 33. Jin, X., et al., Dramatic rise in plasma viremia after CD8(+) T cell depletion in simian immunodeficiency virus-infected macaques. J Exp Med, 1999.189(6): p. 991-8.
[0233] 34. Carbone, F. R. and M. J. Bevan, Class I-restricted processing and presentation of exogenous cell- associated antigen in vivo. J Exp Med, 1990. 171(2): p. 377-87.
[0234] 35. Larsson, M., et al., Efficiency of cross presentation of vaccinia virus-derived antigens by human dendritic cells. Eur J Immunol, 2001. 31(12): p. 3432-42.
[0235] 36. Chen, Q., et al., A direct comparison of cytolytic T-lymphocyte responses to Melan-A peptides in vitro: differential immunogenicity of Melan-A27-35 and Melan-A26-35. Melanoma Res, 2000. 10(1): p. 16-25.
[0236] 37. Lu, W., et al., Therapeutic dendritic-cell vaccine for simian AIDS. Nat Med, 2003. 9(1): p. 27-32.
[0237] 38. Pospisilova, D., et al., Generation of functional dendritic cells for potential use in the treatment of acute lymphoblastic leukemia. Cancer Immunol Immunother, 2002. 51(2): p. 72-8.
[0238] 39. Melief, C. J., et al., Effective therapeutic anticancer vaccines based on precision guiding of cytolytic T lymphocytes. Immunol Rev, 2002. 188(1): p. 177-82.
[0239] 40. Mehlhop, E., et al., Enhanced in vitro stimulation of rhesus macaque dendritic cells for activation of SIV-specific T cell responses. J Immunol Methods, 2002. 260(1-2): p. 219-34.
[0240] 41. Sapp, M., et al., Dendritic cells generated from blood monocytes of HIV-1 patients are not infected and act as competent antigen presenting cells eliciting potent T-cell responses. Immunol Lett, 1999.66(1-3): p. 121-8.
[0241] 42. Chougnet, C., et al., Normal immune function of monocyte-derived dendritic cells from HIV-infected individuals: implications for immunotherapy. J Immunol, 1999.163(3): p.1666-73.

The application's sequence listing, which the Patent Office published only in electronic form, follows.

SEQUENCE LISTING (2232 sequences)

SEQ ID NO: 1 - protein, 15 aa, Artificial
  SIV gag peptide 1
MGVRNSVLSGKKADE

SEQ ID NO: 2 - protein, 15 aa, Artificial
  SIV gag peptide 2
NSVLSGKKADELEKI

SEQ ID NO: 3 - protein, 15 aa, Artificial
  SIV gag peptide 3
SGKKADELEKIRLRP

SEQ ID NO: 4 - protein, 15 aa, Artificial
  SIV gag peptide 4
ADELEKIRLRPNGKK

SEQ ID NO: 5 - protein, 15 aa, Artificial
  SIV gag peptide 5
EKIRLRPNGKKKYML

SEQ ID NO: 6 - protein, 15 aa, Artificial
  SIV gag peptide 6
LRPNGKKKYMLKHVV

SEQ ID NO: 7 - protein, 15 aa, Artificial
  SIV gag peptide 7
GKKKYMLKHVVWAAN

SEQ ID NO: 8 - protein, 15 aa, Artificial
  SIV gag peptide 8
YMLKHVVWAANELDR

SEQ ID NO: 9 - protein, 15 aa, Artificial
  SIV gag peptide 9
HVVWAANELDRFGLA

SEQ ID NO: 10 - protein, 15 aa, Artificial
  SIV gag peptide 10
AANELDRFGLAESLL

SEQ ID NO: 11 - protein, 15 aa, Artificial
  SIV gag peptide 11
LDRFGLAESLLENKE

SEQ ID NO: 12 - protein, 15 aa, Artificial
  SIV gag peptide 12
GLAESLLENKEGCQK

SEQ ID NO: 13 - protein, 15 aa, Artificial
  SIV gag peptide 13
SLLENKEGCQKILSV

SEQ ID NO: 14 - protein, 15 aa, Artificial
  SIV gag peptide 14
NKEGCQKILSVLAPL

SEQ ID NO: 15 - protein, 15 aa, Artificial
  SIV gag peptide 15
CQKILSVLAPLVPTG

SEQ ID NO: 16 - protein, 15 aa, Artificial
  SIV gag peptide 16
LSVLAPLVPTGSENL

SEQ ID NO: 17 - protein, 15 aa, Artificial
  SIV gag peptide 17
LSVLAPLVPTGSENL

SEQ ID NO: 18 - protein, 15 aa, Artificial
  SIV gag peptide 18
PTGSENLKSLYNTVC

SEQ ID NO: 19 - protein, 15 aa, Artificial
  SIV gag peptide 19
ENLKSLYNTVCVIWC

SEQ ID NO: 20 - protein, 15 aa, Artificial
  SIV gag peptide 20
SLYNTVCVIWCIHAE

SEQ ID NO: 21 - protein, 15 aa, Artificial
  SIV gag peptide 21
TVCVIWCIHAEEKVK

SEQ ID NO: 22 - protein, 15 aa, Artificial
  SIV gag peptide 22
IWCIHAEEKVKHTEE

SEQ ID NO: 23 - protein, 15 aa, Artificial
  SIV gag peptide 23
HAEEKVKHTEEAKQI

SEQ ID NO: 24 - protein, 15 aa, Artificial
  SIV gag peptide 24
KVKHTEEAKQIVQRH

SEQ ID NO: 25 - protein, 15 aa, Artificial
  SIV gag peptide 25
TEEAKQIVQRHLVVE

SEQ ID NO: 26 - protein, 15 aa, Artificial
  SIV gag peptide 26
KQIVQRHLVVETGTT

SEQ ID NO: 27 - protein, 15 aa, Artificial
  SIV gag peptide 27
QRHLVVETGTTETMP

SEQ ID NO: 28 - protein, 15 aa, Artificial
  SIV gag peptide 28
VVETGTTETMPKTSR

SEQ ID NO: 29 - protein, 15 aa, Artificial
  SIV gag peptide 29
GTTETMPKTSRPTAP

SEQ ID NO: 30 - protein, 15 aa, Artificial
  SIV gag peptide 30
TMPKTSRPTAPSSGR

SEQ ID NO: 31 - protein, 15 aa, Artificial
  SIV gag peptide 31
TSRPTAPSSGRGGNY

SEQ ID NO: 32 - protein, 15 aa, Artificial
  SIV gag peptide 32
TAPSSGRGGNYPVQQ

SEQ ID NO: 33 - protein, 15 aa, Artificial
  SIV gag peptide 33
SGRGGNYPVQQIGGN

SEQ ID NO: 34 - protein, 15 aa, Artificial
  SIV gag peptide 34
GNYPVQQIGGNYVHL

SEQ ID NO: 35 - protein, 15 aa, Artificial
  SIV gag peptide 35
VQQIGGNYVHLPLSP

SEQ ID NO: 36 - protein, 15 aa, Artificial
  SIV gag peptide 36
GGNYVHLPLSPRTLN

SEQ ID NO: 37 - protein, 15 aa, Artificial
  SIV gag peptide 37
VHLPLSPRTLNAWVK

SEQ ID NO: 38 - protein, 15 aa, Artificial
  SIV gag peptide 38
LSPRTLNAWVKLIEE

SEQ ID NO: 39 - protein, 15 aa, Artificial
  SIV gag peptide 39
TLNAWVKLIEEKKFG

SEQ ID NO: 40 - protein, 15 aa, Artificial
  SIV gag peptide 40
WVKLIEEKKFGAEVV

SEQ ID NO: 41 - protein, 15 aa, Artificial
  SIV gag peptide 41
IEEKKFGAEVVPGFQ

SEQ ID NO: 42 - protein, 15 aa, Artificial
  SIV gag peptide 42
KFGAEVVPGFQALSE

SEQ ID NO: 43 - protein, 15 aa, Artificial
  SIV gag peptide 43
EVVPGFQALSEGCTP

SEQ ID NO: 44 - protein, 15 aa, Artificial
  SIV gag peptide 44
GFQALSEGCTPYDIN

SEQ ID NO: 45 - protein, 15 aa, Artificial
  SIV gag peptide 45
LSEGCTPYDINQMLN

SEQ ID NO: 46 - protein, 15 aa, Artificial
  SIV gag peptide 46
CTPYDINQMLNCVGD

SEQ ID NO: 47 - protein, 15 aa, Artificial
  SIV gag peptide 47
DINQMLNCVGDHQAA

SEQ ID NO: 48 - protein, 15 aa, Artificial
  SIV gag peptide 48
MLNCVGDHQAAMQII

SEQ ID NO: 49 - protein, 15 aa, Artificial
  SIV gag peptide 49
VGDHQAAMQIIRDII

SEQ ID NO: 50 - protein, 15 aa, Artificial
  SIV gag peptide 50
QAAMQIIRDIINEEA

SEQ ID NO: 51 - protein, 15 aa, Artificial
  SIV gag peptide 51
QIIRDIINEEAADWD

SEQ ID NO: 52 - protein, 15 aa, Artificial
  SIV gag peptide 52
DIINEEAADWDLQHP

SEQ ID NO: 53 - protein, 15 aa, Artificial
  SIV gag peptide 53
EEAADWDLQHPQPAP

SEQ ID NO: 54 - protein, 15 aa, Artificial
  SIV gag peptide 54
DWDLQHPQPAPQQGQ

SEQ ID NO: 55 - protein, 15 aa, Artificial
  SIV gag peptide 55
QHPQPAPQQGQLREP

SEQ ID NO: 56 - protein, 15 aa, Artificial
  SIV gag peptide 56
PAPQQGQLREPSGSD

SEQ ID NO: 57 - protein, 15 aa, Artificial
  SIV gag peptide 57
QGQLREPSGSDIAGT

SEQ ID NO: 58 - protein, 15 aa, Artificial
  SIV gag peptide 58
REPSGSDIAGTTSSV

SEQ ID NO: 59 - protein, 15 aa, Artificial
  SIV gag peptide 59
GSDIAGTTSSVDEQI

SEQ ID NO: 60 - protein, 15 aa, Artificial
  SIV gag peptide 60
AGTTSSVDEQIQWMY

SEQ ID NO: 61 - protein, 15 aa, Artificial
  SIV gag peptide 61
SSVDEQIQWMYRQQN

SEQ ID NO: 62 - protein, 15 aa, Artificial
  SIV gag peptide 62
EQIQWMYRQQNPIPV

SEQ ID NO: 63 - protein, 15 aa, Artificial
  SIV gag peptide 63
WMYRQQNPIPVGNIY

SEQ ID NO: 64 - protein, 15 aa, Artificial
  SIV gag peptide 64
QQNPIPVGNIYRRWI

SEQ ID NO: 65 - protein, 15 aa, Artificial
  SIV gag peptide 65
IPVGNIYRRWIQLGL

SEQ ID NO: 66 - protein, 15 aa, Artificial
  SIV gag peptide 66
NIYRRWIQLGLQKCV

SEQ ID NO: 67 - protein, 15 aa, Artificial
  SIV gag peptide 67
RWIQLGLQKCVRMYN

SEQ ID NO: 68 - protein, 15 aa, Artificial
  SIV gag peptide 68
LGLQKCVRMYNPTNI

SEQ ID NO: 69 - protein, 15 aa, Artificial
  SIV gag peptide 69
KCVRMYNPTNILDVK

SEQ ID NO: 70 - protein, 15 aa, Artificial
  SIV gag peptide 70
MYNPTNILDVKQGPK

SEQ ID NO: 71 - protein, 15 aa, Artificial
  SIV gag peptide 71
TNILDVKQGPKEPFQ

SEQ ID NO: 72 - protein, 15 aa, Artificial
  SIV gag peptide 72
DVKQGPKEPFQSYVD

SEQ ID NO: 73 - protein, 15 aa, Artificial
  SIV gag peptide 73
GPKEPFQSYVDRFYK

SEQ ID NO: 74 - protein, 15 aa, Artificial
  SIV gag peptide 74
PFQSYVDRFYKSLRA

SEQ ID NO: 75 - protein, 15 aa, Artificial
  SIV gag peptide 75
YVDRFYKSLRAEQTD

SEQ ID NO: 76 - protein, 15 aa, Artificial
  SIV gag peptide 76
FYKSLRAEQTDAAVK

SEQ ID NO: 77 - protein, 15 aa, Artificial
  SIV gag peptide 77
LRAEQTDAAVKNWMT

SEQ ID NO: 78 - protein, 15 aa, Artificial
  SIV gag peptide 78
QTDAAVKNWMTQTLL

SEQ ID NO: 79 - protein, 15 aa, Artificial
  SIV gag peptide 79
AVKNWMTQTLLIQNA

SEQ ID NO: 80 - protein, 15 aa, Artificial
  SIV gag peptide 80
WMTQTLLIQNANPDC

SEQ ID NO: 81 - protein, 15 aa, Artificial
  SIV gag peptide 81
TLLIQNANPDCKLVL

SEQ ID NO: 82 - protein, 15 aa, Artificial
  SIV gag peptide 82
QNANPDCKLVLKGLG

SEQ ID NO: 83 - protein, 15 aa, Artificial
  SIV gag peptide 83
PDCKLVLKGLGVNPT

SEQ ID NO: 84 - protein, 15 aa, Artificial
  SIV gag peptide 84
LVLKGLGVNPTLEEM

SEQ ID NO: 85 - protein, 15 aa, Artificial
  SIV gag peptide 85
GLGVNPTLEEMLTAC

SEQ ID NO: 86 - protein, 15 aa, Artificial
  SIV gag peptide 86
NPTLEEMLTACQGVG

SEQ ID NO: 87 - protein, 15 aa, Artificial
  SIV gag peptide 87
EEMLTACQGVGGPGQ

SEQ ID NO: 88 - protein, 15 aa, Artificial
  SIV gag peptide 88
TACQGVGGPGQKARL

SEQ ID NO: 89 - protein, 15 aa, Artificial
  SIV gag peptide 89
GVGGPGQKARLMAEA

SEQ ID NO: 90 - protein, 15 aa, Artificial
  SIV gag peptide 90
PGQKARLMAEALKEA

SEQ ID NO: 91 - protein, 15 aa, Artificial
  SIV gag peptide 91
ARLMAEALKEALAPV

SEQ ID NO: 92 - protein, 15 aa, Artificial
  SIV gag peptide 92
AEALKEALAPVPIPF

SEQ ID NO: 93 - protein, 15 aa, Artificial
  SIV gag peptide 93
KEALAPVPIPFAAAQ

SEQ ID NO: 94 - protein, 15 aa, Artificial
  SIV gag peptide 94
APVPIPFAAAQQRGP

SEQ ID NO: 95 - protein, 15 aa, Artificial
  SIV gag peptide 95
IPFAAAQQRGPRKPI

SEQ ID NO: 96 - protein, 15 aa, Artificial
  SIV gag peptide 96
AAQQRGPRKPIKCWN

SEQ ID NO: 97 - protein, 15 aa, Artificial
  SIV gag peptide 97
RGPRKPIKCWNCGKE

SEQ ID NO: 98 - protein, 15 aa, Artificial
  SIV gag peptide 98
KPIKCWNCGKEGHSA

SEQ ID NO: 99 - protein, 15 aa, Artificial
  SIV gag peptide 99
CWNCGKEGHSARQCR

SEQ ID NO: 100 - protein, 15 aa, Artificial
  SIV gag peptide 100
GKEGHSARQCRAPRR

SEQ ID NO: 101 - protein, 15 aa, Artificial
  SIV gag peptide 101
HSARQCRAPRRQGCW

SEQ ID NO: 102 - protein, 15 aa, Artificial
  SIV gag peptide 102
QCRAPRRQGCWKCGK

SEQ ID NO: 103 - protein, 15 aa, Artificial
  SIV gag peptide 103
PRRQGCWKCGKMDHV

SEQ ID NO: 104 - protein, 15 aa, Artificial
  SIV gag peptide 104
GCWKCGKMDHVMAKC

SEQ ID NO: 105 - protein, 15 aa, Artificial
  SIV gag peptide 105
CGKMDHVMAKCPDRQ

SEQ ID NO: 106 - protein, 15 aa, Artificial
  SIV gag peptide 106
DHVMAKCPDRQAGFL

SEQ ID NO: 107 - protein, 15 aa, Artificial
  SIV gag peptide 107
AKCPDRQAGFLGLGP

SEQ ID NO: 108 - protein, 15 aa, Artificial
  SIV gag peptide 108
DRQAGFLGLGPWGKK

SEQ ID NO: 109 - protein, 15 aa, Artificial
  SIV gag peptide 109
GFLGLGPWGKKPRNF

SEQ ID NO: 110 - protein, 15 aa, Artificial
  SIV gag peptide 110
LGPWGKKPRNFPMAQ

SEQ ID NO: 111 - protein, 15 aa, Artificial
  SIV gag peptide 111
GKKPRNFPMAQVHQG

SEQ ID NO: 112 - protein, 15 aa, Artificial
  SIV gag peptide 112
RNFPMAQVHQGLMPT

SEQ ID NO: 113 - protein, 15 aa, Artificial
  SIV gag peptide 113
MAQVHQGLMPTAPPE

SEQ ID NO: 114 - protein, 15 aa, Artificial
  SIV gag peptide 114
HQGLMPTAPPEDPAV

SEQ ID NO: 115 - protein, 15 aa, Artificial
  SIV gag peptide 115
MPTAPPEDPAVDLLK

SEQ ID NO: 116 - protein, 15 aa, Artificial
  SIV gag peptide 116
PPEDPAVDLLKNYMQ

SEQ ID NO: 117 - protein, 15 aa, Artificial
  SIV gag peptide 117
PAVDLLKNYMQLGKQ

SEQ ID NO: 118 - protein, 15 aa, Artificial
  SIV gag peptide 118
LLKNYMQLGKQQREK

SEQ ID NO: 119 - protein, 15 aa, Artificial
  SIV gag peptide 119
YMQLGKQQREKQRES

SEQ ID NO: 120 - protein, 15 aa, Artificial
  SIV gag peptide 120
GKQQREKQRESREKP

SEQ ID NO: 121 - protein, 15 aa, Artificial
  SIV gag peptide 121
REKQRESREKPYKEV

SEQ ID NO: 122 - protein, 15 aa, Artificial
  SIV gag peptide 122
RESREKPYKEVTEDL

SEQ ID NO: 123 - protein, 15 aa, Artificial
  SIV gag peptide 123
EKPYKEVTEDLLHLN

SEQ ID NO: 124 - protein, 15 aa, Artificial
  SIV gag peptide 124
KEVTEDLLHLNSLFG

SEQ ID NO: 125 - protein, 14 aa, Artificial
  SIV gag peptide 125
EDLLHLNSLFGGDQ

SEQ ID NO: 126 - protein, 15 aa, Artificial
  SIV pol peptide 1
VLELWERGTLCKAMQ

SEQ ID NO: 127 - protein, 15 aa, Artificial
  SIV pol peptide 2
WERGTLCKAMQSPKK

SEQ ID NO: 128 - protein, 15 aa, Artificial
  SIVpol peptide 3
TLCKAMQSPKKTGML

SEQ ID NO: 129 - protein, 15 aa, Artificial
  SIV pol peptide 4
AMQSPKKTGMLEMWK

SEQ ID NO: 130 - protein, 15 aa, Artificial
  SIV pol peptide 5
PKKTGMLEMWKNGPC

SEQ ID NO: 131 - protein, 15 aa, Artificial
  SIV pol peptide 6
GMLEMWKNGPCYGQM

SEQ ID NO: 132 - protein, 15 aa, Artificial
  SIV pol peptide 7
MWKNGPCYGQMPRQT

SEQ ID NO: 133 - protein, 15 aa, Artificial
  SIV pol peptide 8
MWKNGPCYGQMPRQT

SEQ ID NO: 134 - protein, 15 aa, Artificial
  SIV pol peptide 9
GQMPRQTGGFFRPWS

SEQ ID NO: 135 - protein, 15 aa, Artificial
  SIV pol peptide 10
RQTGGFFRPWSMGKE

SEQ ID NO: 136 - protein, 15 aa, Artificial
  SIV pol peptide 11
GFFRPWSMGKEAPQF

SEQ ID NO: 137 - protein, 15 aa, Artificial
  SIV pol peptide 12
PWSMGKEAPQFPHGS

SEQ ID NO: 138 - protein, 15 aa, Artificial
  SIV pol peptide 13
GKEAPQFPHGSSASG

SEQ ID NO: 139 - protein, 15 aa, Artificial
  SIV pol peptide 14
PQFPHGSSASGADAN

SEQ ID NO: 140 - protein, 15 aa, Artificial
  SIV pol peptide 15
HGSSASGADANCSPR

SEQ ID NO: 141 - protein, 15 aa, Artificial
  SIV pol peptide 16
ASGADANCSPRGPSC

SEQ ID NO: 142 - protein, 15 aa, Artificial
  SIV pol peptide 17
DANCSPRGPSCGSAK

SEQ ID NO: 143 - protein, 15 aa, Artificial
  SIV pol peptide 18
SPRGPSCGSAKELHA

SEQ ID NO: 144 - protein, 15 aa, Artificial
  SIV pol peptide 19
PSCGSAKELHAVGQA

SEQ ID NO: 145 - protein, 15 aa, Artificial
  SIV pol peptide 20
SAKELHAVGQAAERK

SEQ ID NO: 146 - protein, 15 aa, Artificial
  SIV pol peptide 21
LHAVGQAAERKAERK

SEQ ID NO: 147 - protein, 15 aa, Artificial
  SIV pol peptide 22
GQAAERKAERKQREA

SEQ ID NO: 148 - protein, 15 aa, Artificial
  SIV pol peptide 23
ERKAERKQREALQGG

SEQ ID NO: 149 - protein, 15 aa, Artificial
  SIV pol peptide 24
ERKQREALQGGDRGF

SEQ ID NO: 150 - protein, 15 aa, Artificial
  SIV pol peptide 25
REALQGGDRGFAAPQ

SEQ ID NO: 151 - protein, 15 aa, Artificial
  SIV pol peptide 26
QGGDRGFAAPQFSLW

SEQ ID NO: 152 - protein, 15 aa, Artificial
  SIV pol peptide 27
RGFAAPQFSLWRRPV

SEQ ID NO: 153 - protein, 15 aa, Artificial
  SIV pol peptide 28
APQFSLWRRPVVTAH

SEQ ID NO: 154 - protein, 15 aa, Artificial
  SIV pol peptide 29
SLWRRPVVTAHIEGQ

SEQ ID NO: 155 - protein, 15 aa, Artificial
  SIV pol peptide 30
RPVVTAHIEGQPVEV

SEQ ID NO: 156 - protein, 15 aa, Artificial
  SIV pol peptide 31
TAHIEGQPVEVLLDT

SEQ ID NO: 157 - protein, 15 aa, Artificial
  SIV pol peptide 32
EGQPVEVLLDTGADD

SEQ ID NO: 158 - protein, 15 aa, Artificial
  SIV pol peptide 33
VEVLLDTGADDSIVT

SEQ ID NO: 159 - protein, 15 aa, Artificial
  SIV pol peptide 34
LDTGADDSIVTGIEL

SEQ ID NO: 160 - protein, 15 aa, Artificial
  SIV pol peptide 35
ADDSIVTGIELGPHY

SEQ ID NO: 161 - protein, 15 aa, Artificial
  SIV pol peptide 36
IVTGIELGPHYTPKI

SEQ ID NO: 162 - protein, 15 aa, Artificial
  SIV pol peptide 37
IELGPHYTPKIVGGI

SEQ ID NO: 163 - protein, 15 aa, Artificial
  SIV pol peptide 38
PHYTPKIVGGIGGFI

SEQ ID NO: 164 - protein, 15 aa, Artificial
  SIV pol peptide 39
PKIVGGIGGFINTKE

SEQ ID NO: 165 - protein, 15 aa, Artificial
  SIV pol peptide 40
GGIGGFINTKEYKNV

SEQ ID NO: 166 - protein, 15 aa, Artificial
  SIV pol peptide 41
GFINTKEYKNVEIEV

SEQ ID NO: 167 - protein, 15 aa, Artificial
  SIV pol peptide 42
TKEYKNVEIEVLGKR

SEQ ID NO: 168 - protein, 15 aa, Artificial
  SIV pol peptide 43
KNVEIEVLGKRIKGT

SEQ ID NO: 169 - protein, 15 aa, Artificial
  SIV pol peptide 44
IEVLGKRIKGTIMTG

SEQ ID NO: 170 - protein, 15 aa, Artificial
  SIV pol peptide 45
GKRIKGTIMTGDTPI

SEQ ID NO: 171 - protein, 15 aa, Artificial
  SIV pol peptide 46
KGTIMTGDTPINIFG

SEQ ID NO: 172 - protein, 15 aa, Artificial
  SIV pol peptide 47
MTGDTPINIFGRNLL

SEQ ID NO: 173 - protein, 15 aa, Artificial
  SIV pol peptide 48
TPINIFGRNLLTALG

SEQ ID NO: 174 - protein, 15 aa, Artificial
  SIV pol peptide 49
IFGRNLLTALGMSLN

SEQ ID NO: 175 - protein, 15 aa, Artificial
  SIV pol peptide 50
NLLTALGMSLNFPIA

SEQ ID NO: 176 - protein, 15 aa, Artificial
  SIV pol peptide 51
ALGMSLNFPIAKVEP

SEQ ID NO: 177 - protein, 15 aa, Artificial
  SIV pol peptide 52
SLNFPIAKVEPVKVA

SEQ ID NO: 178 - protein, 15 aa, Artificial
  SIV pol peptide 53
PIAKVEPVKVALKPG

SEQ ID NO: 179 - protein, 15 aa, Artificial
  SIV pol peptide 54
VEPVKVALKPGKDGP

SEQ ID NO: 180 - protein, 15 aa, Artificial
  SIV pol peptide 55
KVALKPGKDGPKLKQ

SEQ ID NO: 181 - protein, 15 aa, Artificial
  SIV pol peptide 56
KPGKDGPKLKQWPLS

SEQ ID NO: 182 - protein, 15 aa, Artificial
  SIV pol peptide 57
DGPKLKQWPLSKEKI

SEQ ID NO: 183 - protein, 15 aa, Artificial
  SIV pol peptide 58
LKQWPLSKEKIVALR

SEQ ID NO: 184 - protein, 15 aa, Artificial
  SIV pol peptide 59
PLSKEKIVALREICE

SEQ ID NO: 185 - protein, 15 aa, Artificial
  SIV pol peptide 60
EKIVALREICEKMEK

SEQ ID NO: 186 - protein, 15 aa, Artificial
  SIV pol peptide 61
ALREICEKMEKDGQL

SEQ ID NO: 187 - protein, 15 aa, Artificial
  SIV pol peptide 62
ICEKMEKDGQLEEAP

SEQ ID NO: 188 - protein, 15 aa, Artificial
  SIV pol peptide 63
MEKDGQLEEAPPTNP

SEQ ID NO: 189 - protein, 15 aa, Artificial
  SIV pol peptide 64
GQLEEAPPTNPYNTP

SEQ ID NO: 190 - protein, 15 aa, Artificial
  SIV pol peptide 65
EAPPTNPYNTPTFAI

SEQ ID NO: 191 - protein, 15 aa, Artificial
  SIV pol peptide 66
TNPYNTPTFAIKKKD

SEQ ID NO: 192 - protein, 15 aa, Artificial
  SIV pol peptide 67
NTPTFAIKKKDKNKW

SEQ ID NO: 193 - protein, 15 aa, Artificial
  SIV pol peptide 68
FAIKKKDKNKWRMLI

SEQ ID NO: 194 - protein, 15 aa, Artificial
  SIV pol peptide 69
KKDKNKWRMLIDFRE

SEQ ID NO: 195 - protein, 15 aa, Artificial
  SIV pol peptide 70
NKWRMLIDFRELNRV

SEQ ID NO: 196 - protein, 15 aa, Artificial
  SIV pol peptide 71
MLIDFRELNRVTQDF

SEQ ID NO: 197 - protein, 15 aa, Artificial
  SIV pol peptide 72
FRELNRVTQDFTEVQ

SEQ ID NO: 198 - protein, 15 aa, Artificial
  SIV pol peptide 73
NRVTQDFTEVQLGIP

SEQ ID NO: 199 - protein, 15 aa, Artificial
  SIV pol peptide 74
QDFTEVQLGIPHPAG

SEQ ID NO: 200 - protein, 15 aa, Artificial
  SIV pol peptide 75
EVQLGIPHPAGLAKR

SEQ ID NO: 201 - protein, 15 aa, Artificial
  SIV pol peptide 76
GIPHPAGLAKRKRIT

SEQ ID NO: 202 - protein, 15 aa, Artificial
  SIV pol peptide 77
PAGLAKRKRITVLDI

SEQ ID NO: 203 - protein, 15 aa, Artificial
  SIV pol peptide 78
AKRKRITVLDIGDAY

SEQ ID NO: 204 - protein, 15 aa, Artificial
  SIV pol peptide 79
RITVLDIGDAYFSIP

SEQ ID NO: 205 - protein, 15 aa, Artificial
  SIV pol peptide 80
LDIGDAYFSIPLDEE

SEQ ID NO: 206 - protein, 15 aa, Artificial
  SIV pol peptide 81
DAYFSIPLDEEFRQY

SEQ ID NO: 207 - protein, 15 aa, Artificial
  SIV pol peptide 82
SIPLDEEFRQYTAFT

SEQ ID NO: 208 - protein, 15 aa, Artificial
  SIV pol peptide 83
DEEFRQYTAFTLPSV

SEQ ID NO: 209 - protein, 15 aa, Artificial
  SIV pol peptide 84
RQYTAFTLPSVNNAE

SEQ ID NO: 210 - protein, 15 aa, Artificial
  SIV pol peptide 85
AFTLPSVNNAEPGKR

SEQ ID NO: 211 - protein, 15 aa, Artificial
  SIV pol peptide 86
PSVNNAEPGKRYIYK

SEQ ID NO: 212 - protein, 15 aa, Artificial
  SIV pol peptide 87
NAEPGKRYIYKVLPQ

SEQ ID NO: 213 - protein, 15 aa, Artificial
  SIV pol peptide 88
GKRYIYKVLPQGWKG

SEQ ID NO: 214 - protein, 15 aa, Artificial
  SIV pol peptide 89
IYKVLPQGWKGSPAI

SEQ ID NO: 215 - protein, 15 aa, Artificial
  SIV pol peptide 90
LPQGWKGSPAIFQYT

SEQ ID NO: 216 - protein, 15 aa, Artificial
  SIV pol peptide 91
WKGSPAIFQYTMRHV

SEQ ID NO: 217 - protein, 15 aa, Artificial
  SIV pol peptide 92
PAIFQYTMRHVLEPF

SEQ ID NO: 218 - protein, 15 aa, Artificial
  SIV pol peptide 93
QYTMRHVLEPFRKAN

SEQ ID NO: 219 - protein, 15 aa, Artificial
  SIV pol peptide 94
RHVLEPFRKANPDVT

SEQ ID NO: 220 - protein, 15 aa, Artificial
  SIV pol peptide 95
EPFRKANPDVTLVQY

SEQ ID NO: 221 - protein, 15 aa, Artificial
  SIV pol peptide 96
KANPDVTLVQYMDDI

SEQ ID NO: 222 - protein, 15 aa, Artificial
  SIV pol peptide 97
DVTLVQYMDDILIAS

SEQ ID NO: 223 - protein, 15 aa, Artificial
  SIV pol peptide 98
VQYMDDILIASDRTD

SEQ ID NO: 224 - protein, 15 aa, Artificial
  SIV pol peptide 99
DDILIASDRTDLEHD

SEQ ID NO: 225 - protein, 15 aa, Artificial
  SIV pol peptide 100
IASDRTDLEHDRVVL

SEQ ID NO: 226 - protein, 15 aa, Artificial
  SIV pol peptide 101
RTDLEHDRVVLQSKE

SEQ ID NO: 227 - protein, 15 aa, Artificial
  SIV pol peptide 102
EHDRVVLQSKELLNS

SEQ ID NO: 228 - protein, 15 aa, Artificial
  SIV pol peptide 103
VVLQSKELLNSIGFS

SEQ ID NO: 229 - protein, 15 aa, Artificial
  SIV pol peptide 104
SKELLNSIGFSTPEE

SEQ ID NO: 230 - protein, 15 aa, Artificial
  SIV pol peptide 105
LNSIGFSTPEEKFQK

SEQ ID NO: 231 - protein, 15 aa, Artificial
  SIV pol peptide 106
GFSTPEEKFQKDPPF

SEQ ID NO: 232 - protein, 15 aa, Artificial
  SIV pol peptide 107
PEEKFQKDPPFQWMG

SEQ ID NO: 233 - protein, 15 aa, Artificial
  SIV pol peptide 108
FQKDPPFQWMGYELW

SEQ ID NO: 234 - protein, 15 aa, Artificial
  SIV pol peptide 109
PPFQWMGYELWPTKW

SEQ ID NO: 235 - protein, 15 aa, Artificial
  SIV pol peptide 110
WMGYELWPTKWKLQK

SEQ ID NO: 236 - protein, 15 aa, Artificial
  SIV pol peptide 111
ELWPTKWKLQKIELP

SEQ ID NO: 237 - protein, 15 aa, Artificial
  SIV pol peptide 112
TKWKLQKIELPQRET

SEQ ID NO: 238 - protein, 15 aa, Artificial
  SIV pol peptide 113
LQKIELPQRETWTVN

SEQ ID NO: 239 - protein, 15 aa, Artificial
  SIV pol peptide 114
ELPQRETWTVNDIQK

SEQ ID NO: 240 - protein, 15 aa, Artificial
  SIV pol peptide 115
RETWTVNDIQKLVGV

SEQ ID NO: 241 - protein, 15 aa, Artificial
  SIV pol peptide 116
TVNDIQKLVGVLNWA

SEQ ID NO: 242 - protein, 15 aa, Artificial
  SIV pol peptide 117
IQKLVGVLNWAAQIY

SEQ ID NO: 243 - protein, 15 aa, Artificial
  SIV pol peptide 118
VGVLNWAAQIYPGIK

SEQ ID NO: 244 - protein, 15 aa, Artificial
  SIV pol peptide 119
NWAAQIYPGIKTKHL

SEQ ID NO: 245 - protein, 15 aa, Artificial
  SIV pol peptide 120
QIYPGIKTKHLCRLI

SEQ ID NO: 246 - protein, 15 aa, Artificial
  SIV pol peptide 121
GIKTKHLCRLIRGKM

SEQ ID NO: 247 - protein, 15 aa, Artificial
  SIV pol peptide 122
KHLCRLIRGKMTLTE

SEQ ID NO: 248 - protein, 15 aa, Artificial
  SIV pol peptide 123
RLIRGKMTLTEEVQW

SEQ ID NO: 249 - protein, 15 aa, Artificial
  SIV pol peptide 124
GKMTLTEEVQWTEMA

SEQ ID NO: 250 - protein, 15 aa, Artificial
  SIV pol peptide 125
LTEEVQWTEMAEAEY

SEQ ID NO: 251 - protein, 15 aa, Artificial
  SIV pol peptide 126
VQWTEMAEAEYEENK

SEQ ID NO: 252 - protein, 15 aa, Artificial
  SIV pol peptide 127
EMAEAEYEENKIILS

SEQ ID NO: 253 - protein, 15 aa, Artificial
  SIV pol peptide 128
AEYEENKIILSQEQE

SEQ ID NO: 254 - protein, 15 aa, Artificial
  SIV pol peptide 129
ENKIILSQEQEGCYY

SEQ ID NO: 255 - protein, 15 aa, Artificial
  SIV pol peptide 130
ILSQEQEGCYYQEGK

SEQ ID NO: 256 - protein, 15 aa, Artificial
  SIV pol peptide 131
EQEGCYYQEGKPLEA

SEQ ID NO: 257 - protein, 15 aa, Artificial
  SIV pol peptide 132
CYYQEGKPLEATVIK

SEQ ID NO: 258 - protein, 15 aa, Artificial
  SIV pol peptide 133
EGKPLEATVIKSQDN

SEQ ID NO: 259 - protein, 15 aa, Artificial
  SIV pol peptide 134
LEATVIKSQDNQWSY

SEQ ID NO: 260 - protein, 15 aa, Artificial
  SIV pol peptide 135
VIKSQDNQWSYKIHQ

SEQ ID NO: 261 - protein, 15 aa, Artificial
  SIV pol peptide 136
QDNQWSYKIHQEDKI

SEQ ID NO: 262 - protein, 15 aa, Artificial
  SIV pol peptide 137
WSYKIHQEDKILKVG

SEQ ID NO: 263 - protein, 15 aa, Artificial
  SIV pol peptide 138
IHQEDKILKVGKFAK

SEQ ID NO: 264 - protein, 15 aa, Artificial
  SIV pol peptide 139
DKILKVGKFAKIKNT

SEQ ID NO: 265 - protein, 15 aa, Artificial
  SIV pol peptide 140
KVGKFAKIKNTHTNG

SEQ ID NO: 266 - protein, 15 aa, Artificial
  SIV pol peptide 141
FAKIKNTHTNGVRLL

SEQ ID NO: 267 - protein, 15 aa, Artificial
  SIV pol peptide 142
KNTHTNGVRLLAHVI

SEQ ID NO: 268 - protein, 15 aa, Artificial
  SIV pol peptide 143
TNGVRLLAHVIQKIG

SEQ ID NO: 269 - protein, 15 aa, Artificial
  SIV pol peptide 144
RLLAHVIQKIGKEAI

SEQ ID NO: 270 - protein, 15 aa, Artificial
  SIV pol peptide 145
HVIQKIGKEAIVIWG

SEQ ID NO: 271 - protein, 15 aa, Artificial
  SIV pol peptide 146
KIGKEAIVIWGQVPK

SEQ ID NO: 272 - protein, 15 aa, Artificial
  SIV pol peptide 147
EAIVIWGQVPKFHLP

SEQ ID NO: 273 - protein, 15 aa, Artificial
  SIV pol peptide 148
IWGQVPKFHLPVEKD

SEQ ID NO: 274 - protein, 15 aa, Artificial
  SIV pol peptide 149
VPKFHLPVEKDVWEQ

SEQ ID NO: 275 - protein, 15 aa, Artificial
  SIV pol peptide 150
HLPVEKDVWEQWWTD

SEQ ID NO: 276 - protein, 15 aa, Artificial
  SIV pol peptide 151
EKDVWEQWWTDYWQV

SEQ ID NO: 277 - protein, 15 aa, Artificial
  SIV pol peptide 152
WEQWWTDYWQVTWIP

SEQ ID NO: 278 - protein, 15 aa, Artificial
  SIV pol peptide 153
WTDYWQVTWIPEWDF

SEQ ID NO: 279 - protein, 15 aa, Artificial
  SIV pol peptide 154
WQVTWIPEWDFISTP

SEQ ID NO: 280 - protein, 15 aa, Artificial
  SIV pol peptide 155
WIPEWDFISTPPLVR

SEQ ID NO: 281 - protein, 15 aa, Artificial
  SIV pol peptide 156
WDFISTPPLVRLVFN

SEQ ID NO: 282 - protein, 15 aa, Artificial
  SIV pol peptide 157
STPPLVRLVFNLVKD

SEQ ID NO: 283 - protein, 15 aa, Artificial
  SIV pol peptide 158
LVRLVFNLVKDPIEG

SEQ ID NO: 284 - protein, 15 aa, Artificial
  SIV pol peptide 159
VFNLVKDPIEGEETY

SEQ ID NO: 285 - protein, 15 aa, Artificial
  SIV pol peptide 160
VKDPIEGEETYYTDG

SEQ ID NO: 286 - protein, 15 aa, Artificial
  SIV pol peptide 161
IEGEETYYTDGSCNK

SEQ ID NO: 287 - protein, 15 aa, Artificial
  SIV pol peptide 162
ETYYTDGSCNKQSKE

SEQ ID NO: 288 - protein, 15 aa, Artificial
  SIV pol peptide 163
TDGSCNKQSKEGKAG

SEQ ID NO: 289 - protein, 15 aa, Artificial
  SIV pol peptide 164
CNKQSKEGKAGYITD

SEQ ID NO: 290 - protein, 15 aa, Artificial
  SIV pol peptide 165
SKEGKAGYITDRGKD

SEQ ID NO: 291 - protein, 15 aa, Artificial
  SIV pol peptide 166
KAGYITDRGKDKVKV

SEQ ID NO: 292 - protein, 15 aa, Artificial
  SIV pol peptide 167
ITDRGKDKVKVLEQT

SEQ ID NO: 293 - protein, 15 aa, Artificial
  SIV pol peptide 168
GKDKVKVLEQTTNQQ

SEQ ID NO: 294 - protein, 15 aa, Artificial
  SIV pol peptide 169
VKVLEQTTNQQAELE

SEQ ID NO: 295 - protein, 15 aa, Artificial
  SIV pol peptide 170
EQTTNQQAELEAFLM

SEQ ID NO: 296 - protein, 15 aa, Artificial
  SIV pol peptide 171
NQQAELEAFLMALTD

SEQ ID NO: 297 - protein, 15 aa, Artificial
  SIV pol peptide 172
ELEAFLMALTDSGPK

SEQ ID NO: 298 - protein, 15 aa, Artificial
  SIV pol peptide 173
FLMALTDSGPKANII

SEQ ID NO: 299 - protein, 15 aa, Artificial
  SIV pol peptide 174
LTDSGPKANIIVDSQ

SEQ ID NO: 300 - protein, 15 aa, Artificial
  SIV pol peptide 175
GPKANIIVDSQYVMG

SEQ ID NO: 301 - protein, 15 aa, Artificial
  SIV pol peptide 176
NIIVDSQYVMGIITG

SEQ ID NO: 302 - protein, 15 aa, Artificial
  SIV pol peptide 177
DSQYVMGIITGCPTE

SEQ ID NO: 303 - protein, 15 aa, Artificial
  SIV pol peptide 178
VMGIITGCPTESESR

SEQ ID NO: 304 - protein, 15 aa, Artificial
  SIV pol peptide 179
ITGCPTESESRLVNQ

SEQ ID NO: 305 - protein, 15 aa, Artificial
  SIV pol peptide 180
PTESESRLVNQIIEE

SEQ ID NO: 306 - protein, 15 aa, Artificial
  SIV pol peptide 181
ESRLVNQIIEEMIKK

SEQ ID NO: 307 - protein, 15 aa, Artificial
  SIV pol peptide 182
VNQIIEEMIKKSEIY

SEQ ID NO: 308 - protein, 15 aa, Artificial
  SIV pol peptide 183
IEEMIKKSEIYVAWV

SEQ ID NO: 309 - protein, 15 aa, Artificial
  SIV pol peptide 184
IKKSEIYVAWVPAHK

SEQ ID NO: 310 - protein, 15 aa, Artificial
  SIV pol peptide 185
EIYVAWVPAHKGIGG

SEQ ID NO: 311 - protein, 15 aa, Artificial
  SIV pol peptide 186
AWVPAHKGIGGNQEI

SEQ ID NO: 312 - protein, 15 aa, Artificial
  SIV pol peptide 187
AHKGIGGNQEIDHLV

SEQ ID NO: 313 - protein, 15 aa, Artificial
  SIV pol peptide 188
IGGNQEIDHLVSQGI

SEQ ID NO: 314 - protein, 15 aa, Artificial
  SIV pol peptide 189
QEIDHLVSQGIRQVL

SEQ ID NO: 315 - protein, 15 aa, Artificial
  SIV pol peptide 190
HLVSQGIRQVLFLEK

SEQ ID NO: 316 - protein, 15 aa, Artificial
  SIV pol peptide 191
QGIRQVLFLEKIEPA

SEQ ID NO: 317 - protein, 15 aa, Artificial
  SIV pol peptide 192
QVLFLEKIEPAQEEH

SEQ ID NO: 318 - protein, 15 aa, Artificial
  SIV pol peptide 193
LEKIEPAQEEHDKYH

SEQ ID NO: 319 - protein, 15 aa, Artificial
  SIV pol peptide 194
EPAQEEHDKYHSNVK

SEQ ID NO: 320 - protein, 15 aa, Artificial
  SIV pol peptide 195
EEHDKYHSNVKELVF

SEQ ID NO: 321 - protein, 15 aa, Artificial
  SIV pol peptide 196
KYHSNVKELVFKFGL

SEQ ID NO: 322 - protein, 15 aa, Artificial
  SIV pol peptide 197
NVKELVFKFGLPRIV

SEQ ID NO: 323 - protein, 15 aa, Artificial
  SIV pol peptide 198
LVFKFGLPRIVARQI

SEQ ID NO: 324 - protein, 15 aa, Artificial
  SIV pol peptide 199
FGLPRIVARQIVDTC

SEQ ID NO: 325 - protein, 15 aa, Artificial
  SIV pol peptide 200
RIVARQIVDTCDKCH

SEQ ID NO: 326 - protein, 15 aa, Artificial
  SIV pol peptide 201
RQIVDTCDKCHQKGE

SEQ ID NO: 327 - protein, 15 aa, Artificial
  SIV pol peptide 202
DTCDKCHQKGEAIHG

SEQ ID NO: 328 - protein, 15 aa, Artificial
  SIV polpeptide 203
KCHQKGEAIHGQANS

SEQ ID NO: 329 - protein, 15 aa, Artificial
  SIV pol peptide 204
KGEAIHGQANSDLGT

SEQ ID NO: 330 - protein, 15 aa, Artificial
  SIV pol peptide 205
IHGQANSDLGTWQMD

SEQ ID NO: 331 - protein, 15 aa, Artificial
  SIV pol peptide 206
ANSDLGTWQMDCTHL

SEQ ID NO: 332 - protein, 15 aa, Artificial
  SIV pol peptide 207
LGTWQMDCTHLEGKI

SEQ ID NO: 333 - protein, 15 aa, Artificial
  SIV pol peptide 208
QMDCTHLEGKIIIVA

SEQ ID NO: 334 - protein, 15 aa, Artificial
  SIV pol peptide 209
THLEGKIIIVAVHVA

SEQ ID NO: 335 - protein, 15 aa, Artificial
  SIV pol peptide 210
GKIIIVAVHVASGFI

SEQ ID NO: 336 - protein, 15 aa, Artificial
  SIV pol peptide 211
IVAVHVASGFIEAEV

SEQ ID NO: 337 - protein, 15 aa, Artificial
  SIV pol peptide 212
HVASGFIEAEVIPQE

SEQ ID NO: 338 - protein, 15 aa, Artificial
  SIV pol peptide 213
GFIEAEVIPQETGRQ

SEQ ID NO: 339 - protein, 15 aa, Artificial
  SIV pol peptide 214
AEVIPQETGRQTALF

SEQ ID NO: 340 - protein, 15 aa, Artificial
  SIV pol peptide 215
PQETGRQTALFLLKL

SEQ ID NO: 341 - protein, 15 aa, Artificial
  SIV pol peptide 216
GRQTALFLLKLAGRW

SEQ ID NO: 342 - protein, 15 aa, Artificial
  SIV pol peptide 217
ALFLLKLAGRWPITH

SEQ ID NO: 343 - protein, 15 aa, Artificial
  SIV pol peptide 218
LKLAGRWPITHLHTD

SEQ ID NO: 344 - protein, 15 aa, Artificial
  SIV pol peptide 219
GRWPITHLHTDNGAN

SEQ ID NO: 345 - protein, 15 aa, Artificial
  SIV pol peptide 220
ITHLHTDNGANFASQ

SEQ ID NO: 346 - protein, 15 aa, Artificial
  SIV pol peptide 221
HTDNGANFASQEVKM

SEQ ID NO: 347 - protein, 15 aa, Artificial
  SIV pol peptide 222
GANFASQEVKMVAWW

SEQ ID NO: 348 - protein, 15 aa, Artificial
  SIV pol peptide 223
ASQEVKMVAWWAGIE

SEQ ID NO: 349 - protein, 15 aa, Artificial
  SIV pol peptide 224
VKMVAWWAGIEHTFG

SEQ ID NO: 350 - protein, 15 aa, Artificial
  SIV pol peptide 225
AWWAGIEHTFGVPYN

SEQ ID NO: 351 - protein, 15 aa, Artificial
  SIV pol peptide 226
GIEHTFGVPYNPQSQ

SEQ ID NO: 352 - protein, 15 aa, Artificial
  SIV pol peptide 227
TFGVPYNPQSQGVVE

SEQ ID NO: 353 - protein, 15 aa, Artificial
  SIV pol peptide 228
PYNPQSQGVVEAMNH

SEQ ID NO: 354 - protein, 15 aa, Artificial
  SIV pol peptide 229
QSQGVVEAMNHHLKN

SEQ ID NO: 355 - protein, 15 aa, Artificial
  SIV pol peptide 230
VVEAMNHHLKNQIDR

SEQ ID NO: 356 - protein, 15 aa, Artificial
  SIV pol peptide 231
MNHHLKNQIDRIREQ

SEQ ID NO: 357 - protein, 15 aa, Artificial
  SIV pol peptide 232
LKNQIDRIREQANSV

SEQ ID NO: 358 - protein, 15 aa, Artificial
  SIV pol peptide 233
IDRIREQANSVETIV

SEQ ID NO: 359 - protein, 15 aa, Artificial
  SIV pol peptide 234
REQANSVETIVLMAV

SEQ ID NO: 360 - protein, 15 aa, Artificial
  SIV pol peptide 235
NSVETIVLMAVHCMN

SEQ ID NO: 361 - protein, 15 aa, Artificial
  SIV pol peptide 236
TIVLMAVHCMNFKRR

SEQ ID NO: 362 - protein, 15 aa, Artificial
  SIV pol peptide 237
MAVHCMNFKRRGGIG

SEQ ID NO: 363 - protein, 15 aa, Artificial
  SIV pol peptide 238
CMNFKRRGGIGDMTP

SEQ ID NO: 364 - protein, 15 aa, Artificial
  SIV pol peptide 239
KRRGGIGDMTPAERL

SEQ ID NO: 365 - protein, 15 aa, Artificial
  SIV pol peptide 240
GIGDMTPAERLINMI

SEQ ID NO: 366 - protein, 15 aa, Artificial
  SIV pol peptide 241
MTPAERLINMITTEQ

SEQ ID NO: 367 - protein, 15 aa, Artificial
  SIV pol peptide 242
ERLINMITTEQEIQF

SEQ ID NO: 368 - protein, 15 aa, Artificial
  SIV pol peptide 243
NMITTEQEIQFQQSK

SEQ ID NO: 369 - protein, 15 aa, Artificial
  SIV pol peptide 244
TEQEIQFQQSKNSKF

SEQ ID NO: 370 - protein, 15 aa, Artificial
  SIV pol peptide 245
IQFQQSKNSKFKNFR

SEQ ID NO: 371 - protein, 15 aa, Artificial
  SIV pol peptide 246
QSKNSKFKNFRVYYR

SEQ ID NO: 372 - protein, 15 aa, Artificial
  SIV pol peptide 247
SKFKNFRVYYREGRD

SEQ ID NO: 373 - protein, 15 aa, Artificial
  SIV pol peptide 248
NFRVYYREGRDQLWK

SEQ ID NO: 374 - protein, 15 aa, Artificial
  SIV pol peptide 249
YYREGRDQLWKGPGE

SEQ ID NO: 375 - protein, 15 aa, Artificial
  SIV pol peptide 250
GRDQLWKGPGELLWK

SEQ ID NO: 376 - protein, 15 aa, Artificial
  SIV pol peptide 251
LWKGPGELLWKGEGA

SEQ ID NO: 377 - protein, 15 aa, Artificial
  SIV pol peptide 252
PGELLWKGEGAVILK

SEQ ID NO: 378 - protein, 15 aa, Artificial
  SIV pol peptide 253
LWKGEGAVILKVGTD

SEQ ID NO: 379 - protein, 15 aa, Artificial
  SIV pol peptide 254
EGAVILKVGTDIKVV

SEQ ID NO: 380 - protein, 15 aa, Artificial
  SIV pol peptide 255
ILKVGTDIKVVPRRK

SEQ ID NO: 381 - protein, 15 aa, Artificial
  SIV pol peptide 256
GTDIKVVPRRKAKII

SEQ ID NO: 382 - protein, 15 aa, Artificial
  SIV pol peptide 257
KVVPRRKAKIIKDYG

SEQ ID NO: 383 - protein, 15 aa, Artificial
  SIV pol peptide 258
RRKAKIIKDYGGGKE

SEQ ID NO: 384 - protein, 15 aa, Artificial
  SIV pol peptide 259
KIIKDYGGGKEVDSS

SEQ ID NO: 385 - protein, 15 aa, Artificial
  SIV pol peptide 260
DYGGGKEVDSSSHME

SEQ ID NO: 386 - protein, 15 aa, Artificial
  SIV pol peptide 261
GKEVDSSSHMEDTGE

SEQ ID NO: 387 - protein, 15 aa, Artificial
  SIV pol peptide 262
DSSSHMEDTGEAREV

SEQ ID NO: 388 - protein, 12 aa, Artificial
  SIV pol peptide 263
HMEDTGEAREVA

SEQ ID NO: 389 - protein, 15 aa, Artificial
  SIV nef peptide 1
MGGAISMRRSRPSGD

SEQ ID NO: 390 - protein, 15 aa, Artificial
  SIV nef peptide 2
ISMRRSRPSGDLRQR

SEQ ID NO: 391 - protein, 15 aa, Artificial
  SIV nef peptide 3
RSRPSGDLRQRLLRA

SEQ ID NO: 392 - protein, 15 aa, Artificial
  SIV nef peptide 4
SGDLRQRLLRARGET

SEQ ID NO: 393 - protein, 15 aa, Artificial
  SIV nef peptide 5
RQRLLRARGETYGRL

SEQ ID NO: 394 - protein, 15 aa, Artificial
  SIV nef peptide 6
LRARGETYGRLLGEV

SEQ ID NO: 395 - protein, 15 aa, Artificial
  SIV nef peptide 7
GETYGRLLGEVEDGY

SEQ ID NO: 396 - protein, 15 aa, Artificial
  SIV nef peptide 8
GRLLGEVEDGYSQSP

SEQ ID NO: 397 - protein, 15 aa, Artificial
  SIV nef peptide 9
GEVEDGYSQSPGGLD

SEQ ID NO: 398 - protein, 15 aa, Artificial
  SIV nef peptide 10
DGYSQSPGGLDKGLS

SEQ ID NO: 399 - protein, 15 aa, Artificial
  SIV nef peptide 11
QSPGGLDKGLSSLSC

SEQ ID NO: 400 - protein, 15 aa, Artificial
  SIV nef peptide 12
GLDKGLSSLSCEGQK

SEQ ID NO: 401 - protein, 15 aa, Artificial
  SIV nef peptide 13
GLSSLSCEGQKYNQG

SEQ ID NO: 402 - protein, 15 aa, Artificial
  SIV nef peptide 14
LSCEGQKYNQGQYMN

SEQ ID NO: 403 - protein, 15 aa, Artificial
  SIV nef peptide 15
GQKYNQGQYMNTPWR

SEQ ID NO: 404 - protein, 15 aa, Artificial
  SIV nef peptide 16
NQGQYMNTPWRNPAE

SEQ ID NO: 405 - protein, 15 aa, Artificial
  SIV nef peptide 17
YMNTPWRNPAEEREK

SEQ ID NO: 406 - protein, 15 aa, Artificial
  SIV nef peptide 18
PWRNPAEEREKLAYR

SEQ ID NO: 407 - protein, 15 aa, Artificial
  SIV nef peptide 19
PAEEREKLAYRKQNM

SEQ ID NO: 408 - protein, 15 aa, Artificial
  SIV nef peptide 20
REKLAYRKQNMDDID

SEQ ID NO: 409 - protein, 12 aa, Artificial
  SIV nef peptide 21
AYRKQNMDDIDE

SEQ ID NO: 410 - protein, 15 aa, Artificial
  SHIV env peptide 1
MRVKGIRKNYQHLWR

SEQ ID NO: 411 - protein, 15 aa, Artificial
  SHIV env peptide 2
GIRKNYQHLWRGGTL

SEQ ID NO: 412 - protein, 15 aa, Artificial
  SHIV env peptide 3
NYQHLWRGGTLLLGM

SEQ ID NO: 413 - protein, 15 aa, Artificial
  SHIV env peptide 4
LWRGGTLLLGMLMIC

SEQ ID NO: 414 - protein, 15 aa, Artificial
  SHIV env peptide 5
GTLLLGMLMICSAVE

SEQ ID NO: 415 - protein, 15 aa, Artificial
  SHIV env peptide 6
LGMLMICSAVEKLWV

SEQ ID NO: 416 - protein, 15 aa, Artificial
  SHIV env peptide 7
MICSAVEKLWVTVYY

SEQ ID NO: 417 - protein, 15 aa, Artificial
  SHIV env peptide 8
AVEKLWVTVYYGVPA

SEQ ID NO: 418 - protein, 15 aa, Artificial
  SHIV env peptide 9
LWVTVYYGVPAWKEA

SEQ ID NO: 419 - protein, 15 aa, Artificial
  SHIV env peptide 10
VYYGVPAWKEATTTL

SEQ ID NO: 420 - protein, 15 aa, Artificial
  SHIV env peptide 11
VPAWKEATTTLFCAS

SEQ ID NO: 421 - protein, 15 aa, Artificial
  SHIV env peptide 12
KEATTTLFCASDAKA

SEQ ID NO: 422 - protein, 15 aa, Artificial
  SHIV env peptide 13
TTLFCASDAKAYDTE

SEQ ID NO: 423 - protein, 15 aa, Artificial
  SHIV env peptide 14
CASDAKAYDTEVHNV

SEQ ID NO: 424 - protein, 15 aa, Artificial
  SHIV env peptide 15
AKAYDTEVHNVWATH

SEQ ID NO: 425 - protein, 15 aa, Artificial
  SHIV env peptide 16
DTEVHNVWATHACVP

SEQ ID NO: 426 - protein, 15 aa, Artificial
  SHIV env peptide 17
HNVWATHACVPTDPN

SEQ ID NO: 427 - protein, 15 aa, Artificial
  SHIV env peptide 18
ATHACVPTDPNPQEI

SEQ ID NO: 428 - protein, 15 aa, Artificial
  SHIV env peptide 19
CVPTDPNPQEIVLEN

SEQ ID NO: 429 - protein, 15 aa, Artificial
  SHIV env peptide 20
DPNPQEIVLENVTEN

SEQ ID NO: 430 - protein, 15 aa, Artificial
  SHIV env peptide 21
PQEIVLENVTENFNM

SEQ ID NO: 431 - protein, 15 aa, Artificial
  SHIV env peptide 22
VLENVTENFNMWKNN

SEQ ID NO: 432 - protein, 15 aa, Artificial
  SHIV env peptide 23
VTENFNMWKNNMVEQ

SEQ ID NO: 433 - protein, 15 aa, Artificial
  SHIV env peptide 24
FNMWKNNMVEQMHED

SEQ ID NO: 434 - protein, 15 aa, Artificial
  SHIV env peptide 25
KNNMVEQMHEDIISL

SEQ ID NO: 435 - protein, 15 aa, Artificial
  SHIV env peptide 26
VEQMHEDIISLWDQS

SEQ ID NO: 436 - protein, 15 aa, Artificial
  SHIV env peptide 27
HEDIISLWDQSLEPC

SEQ ID NO: 437 - protein, 15 aa, Artificial
  SHIV env peptide 28
ISLWDQSLEPCVKLT

SEQ ID NO: 438 - protein, 15 aa, Artificial
  SHIV env peptide 29
DQSLEPCVKLTPLCV

SEQ ID NO: 439 - protein, 15 aa, Artificial
  SHIV env peptide 30
EPCVKLTPLCVTLHC

SEQ ID NO: 440 - protein, 15 aa, Artificial
  SHIV env peptide 31
KLTPLCVTLHCTNLE

SEQ ID NO: 441 - protein, 15 aa, Artificial
  SHIV env peptide 32
LCVTLHCTNLENATN

SEQ ID NO: 442 - protein, 15 aa, Artificial
  SHIV env peptide 33
LHCTNLENATNTTSS

SEQ ID NO: 443 - protein, 15 aa, Artificial
  SHIV env peptide 34
NLENATNTTSSNWKE

SEQ ID NO: 444 - protein, 15 aa, Artificial
  SHIV env peptide 35
ATNTTSSNWKEMNRG

SEQ ID NO: 445 - protein, 15 aa, Artificial
  SHIV env peptide 36
TSSNWKEMNRGEIKN

SEQ ID NO: 446 - protein, 15 aa, Artificial
  SHIV env peptide 37
WKEMNRGEIKNCSFN

SEQ ID NO: 447 - protein, 15 aa, Artificial
  SHIV env peptide 38
NRGEIKNCSFNVTTS

SEQ ID NO: 448 - protein, 15 aa, Artificial
  SHIV env peptide 39
IKNCSFNVTTSIGNK

SEQ ID NO: 449 - protein, 15 aa, Artificial
  SHIV env peptide 40
SFNVTTSIGNKMQKE

SEQ ID NO: 450 - protein, 15 aa, Artificial
  SHIV env peptide 41
TTSIGNKMQKEYALF

SEQ ID NO: 451 - protein, 15 aa, Artificial
  SHIV env peptide 42
GNKMQKEYALFYRLD

SEQ ID NO: 452 - protein, 15 aa, Artificial
  SHIV env peptide 43
MQKEYALFYRLDVVP

SEQ ID NO: 453 - protein, 15 aa, Artificial
  SHIV env peptide 44
YALFYRLDVVPIDND

SEQ ID NO: 454 - protein, 15 aa, Artificial
  SHIV env peptide 45
YRLDVVPIDNDNTSY

SEQ ID NO: 455 - protein, 15 aa, Artificial
  SHIV env peptide 46
VVPIDNDNTSYNLIN

SEQ ID NO: 456 - protein, 15 aa, Artificial
  SHIV env peptide 47
DNDNTSYNLINCNTS

SEQ ID NO: 457 - protein, 15 aa, Artificial
  SHIV env peptide 48
TSYNLINCNTSVITQ

SEQ ID NO: 458 - protein, 15 aa, Artificial
  SHIV env peptide 49
LINCNTSVITQACPK

SEQ ID NO: 459 - protein, 15 aa, Artificial
  SHIV env peptide 50
NTSVITQACPKVSFE

SEQ ID NO: 460 - protein, 15 aa, Artificial
  SHIV env peptide 51
ITQACPKVSFEPIPI

SEQ ID NO: 461 - protein, 15 aa, Artificial
  SHIV env peptide 52
CPKVSFEPIPIHYCA

SEQ ID NO: 462 - protein, 15 aa, Artificial
  SHIV env peptide 53
SFEPIPIHYCAPAGF

SEQ ID NO: 463 - protein, 15 aa, Artificial
  SHIV env peptide 54
IPIHYCAPAGFAILK

SEQ ID NO: 464 - protein, 15 aa, Artificial
  SHIV env peptide 55
YCAPAGFAILKCNDK

SEQ ID NO: 465 - protein, 15 aa, Artificial
  SHIV env peptide 56
AGFAILKCNDKKFNG

SEQ ID NO: 466 - protein, 15 aa, Artificial
  SHIV env peptide 57
ILKCNDKKFNGSGPC

SEQ ID NO: 467 - protein, 15 aa, Artificial
  SHIV env peptide 58
NDKKFNGSGPCINVS

SEQ ID NO: 468 - protein, 15 aa, Artificial
  SHIV env peptide 59
FNGSGPCINVSTVQC

SEQ ID NO: 469 - protein, 15 aa, Artificial
  SHIV env peptide 60
GPCINVSTVQCTHGI

SEQ ID NO: 470 - protein, 15 aa, Artificial
  SHIV env peptide 61
NVSTVQCTHGIRPVV

SEQ ID NO: 471 - protein, 15 aa, Artificial
  SHIV env peptide 62
VQCTHGIRPVVSTQL

SEQ ID NO: 472 - protein, 15 aa, Artificial
  SHIV env peptide 63
HGIRPVVSTQLLLNG

SEQ ID NO: 473 - protein, 15 aa, Artificial
  SHIV env peptide 64
PVVSTQLLLNGSLAE

SEQ ID NO: 474 - protein, 15 aa, Artificial
  SHIV env peptide 65
TQLLLNGSLAEEGVV

SEQ ID NO: 475 - protein, 15 aa, Artificial
  SHIV env peptide 66
LNGSLAEEGVVIRSE

SEQ ID NO: 476 - protein, 15 aa, Artificial
  SHIV env peptide 67
LAEEGVVIRSENFTD

SEQ ID NO: 477 - protein, 15 aa, Artificial
  SHIV env peptide 68
GVVIRSENFTDNVKT

SEQ ID NO: 478 - protein, 15 aa, Artificial
  SHIV env peptide 69
RSENFTDNVKTIIVQ

SEQ ID NO: 479 - protein, 15 aa, Artificial
  SHIV env peptide 70
FTDNVKTIIVQLKES

SEQ ID NO: 480 - protein, 15 aa, Artificial
  SHIV env peptide 71
VKTIIVQLKESVEIN

SEQ ID NO: 481 - protein, 15 aa, Artificial
  SHIV env peptide 72
IVQLKESVEINCTRP

SEQ ID NO: 482 - protein, 15 aa, Artificial
  SHIV env peptide 73
KESVEINCTRPNNNT

SEQ ID NO: 483 - protein, 15 aa, Artificial
  SHIV env peptide 74
EINCTRPNNNTRKSI

SEQ ID NO: 484 - protein, 15 aa, Artificial
  SHIV env peptide 75
TRPNNNTRKSIPIGP

SEQ ID NO: 485 - protein, 15 aa, Artificial
  SHIV env peptide 76
NNTRKSIPIGPGKAF

SEQ ID NO: 486 - protein, 15 aa, Artificial
  SHIV env peptide 77
KSIPIGPGKAFYATG

SEQ ID NO: 487 - protein, 15 aa, Artificial
  SHIV env peptide 78
IGPGKAFYATGDIIG

SEQ ID NO: 488 - protein, 15 aa, Artificial
  SHIV env peptide 79
KAFYATGDIIGDIRQ

SEQ ID NO: 489 - protein, 15 aa, Artificial
  SHIV env peptide 80
ATGDIIGDIRQAHCN

SEQ ID NO: 490 - protein, 15 aa, Artificial
  SHIV env peptide 81
IIGDIRQAHCNISGE

SEQ ID NO: 491 - protein, 15 aa, Artificial
  SHIV env peptide 82
IRQAHCNISGEKWNN

SEQ ID NO: 492 - protein, 15 aa, Artificial
  SHIV env peptide 83
HCNISGEKWNNTLKQ

SEQ ID NO: 493 - protein, 15 aa, Artificial
  SHIV env peptide 84
SGEKWNNTLKQIVTK

SEQ ID NO: 494 - protein, 15 aa, Artificial
  SHIV env peptide 85
WNNTLKQIVTKLQAQ

SEQ ID NO: 495 - protein, 15 aa, Artificial
  SHIV env peptide 86
LKQIVTKLQAQFENK

SEQ ID NO: 496 - protein, 15 aa, Artificial
  SHIV env peptide 87
VTKLQAQFENKTIVF

SEQ ID NO: 497 - protein, 15 aa, Artificial
  SHIV env peptide 88
LQAQFENKTIVFKQS

SEQ ID NO: 498 - protein, 15 aa, Artificial
  SHIV env peptide 89
FENKTIVFKQSSGGD

SEQ ID NO: 499 - protein, 15 aa, Artificial
  SHIV env peptide 90
TIVFKQSSGGDPEIV

SEQ ID NO: 500 - protein, 15 aa, Artificial
  SHIV env peptide 91
KQSSGGDPEIVMHSF

SEQ ID NO: 501 - protein, 15 aa, Artificial
  SHIV env peptide 92
GGDPEIVMHSFNCGG

SEQ ID NO: 502 - protein, 15 aa, Artificial
  SHIV env peptide 93
EIVMHSFNCGGEFFY

SEQ ID NO: 503 - protein, 15 aa, Artificial
  SHIV env peptide 94
HSFNCGGEFFYCNST

SEQ ID NO: 504 - protein, 15 aa, Artificial
  SHIV env peptide 95
CGGEFFYCNSTQLFN

SEQ ID NO: 505 - protein, 15 aa, Artificial
  SHIV env peptide 96
FFYCNSTQLFNSTWN

SEQ ID NO: 506 - protein, 15 aa, Artificial
  SHIV env peptide 97
NSTQLFNSTWNNTIG

SEQ ID NO: 507 - protein, 15 aa, Artificial
  SHIV env peptide 98
LFNSTWNNTIGPNNT

SEQ ID NO: 508 - protein, 15 aa, Artificial
  SHIV env peptide 99
TWNNTIGPNNTNGTI

SEQ ID NO: 509 - protein, 15 aa, Artificial
  SHIV env peptide 100
TIGPNNTNGTITLPC

SEQ ID NO: 510 - protein, 15 aa, Artificial
  SHIV env peptide 101
NNTNGTITLPCRIKQ

SEQ ID NO: 511 - protein, 15 aa, Artificial
  SHIV env peptide 102
GTITLPCRIKQIINR

SEQ ID NO: 512 - protein, 15 aa, Artificial
  SHIV env peptide 103
LPCRIKQIINRWQEV

SEQ ID NO: 513 - protein, 15 aa, Artificial
  SHIV env peptide 104
IKQIINRWQEVGKAM

SEQ ID NO: 514 - protein, 15 aa, Artificial
  SHIV env peptide 105
INRWQEVGKAMYAPP

SEQ ID NO: 515 - protein, 15 aa, Artificial
  SHIV env peptide 106
WQEVGKAMYAPPIRG

SEQ ID NO: 516 - protein, 15 aa, Artificial
  SHIV env peptide 107
GKAMYAPPIRGQIRC

SEQ ID NO: 517 - protein, 15 aa, Artificial
  SHIV env peptide 108
YAPPIRGQIRCSSNI

SEQ ID NO: 518 - protein, 15 aa, Artificial
  SHIV env peptide 109
IRGQIRCSSNITGLL

SEQ ID NO: 519 - protein, 15 aa, Artificial
  SHIV env peptide 110
IRCSSNITGLLLTRD

SEQ ID NO: 520 - protein, 15 aa, Artificial
  SHIV env peptide 111
SNITGLLLTRDGGRE

SEQ ID NO: 521 - protein, 15 aa, Artificial
  SHIV env peptide 112
GLLLTRDGGREVGNT

SEQ ID NO: 522 - protein, 15 aa, Artificial
  SHIV env peptide 113
TRDGGREVGNTTEIF

SEQ ID NO: 523 - protein, 15 aa, Artificial
  SHIV env peptide 114
GREVGNTTEIFRPGG

SEQ ID NO: 524 - protein, 15 aa, Artificial
  SHIV env peptide 115
GNTTEIFRPGGGDMR

SEQ ID NO: 525 - protein, 15 aa, Artificial
  SHIV env peptide 116
EIFRPGGGDMRDNWR

SEQ ID NO: 526 - protein, 15 aa, Artificial
  SHIV env peptide 117
PGGGDMRDNWRSELY

SEQ ID NO: 527 - protein, 15 aa, Artificial
  SHIV env peptide 118
DMRDNWRSELYKYKV

SEQ ID NO: 528 - protein, 15 aa, Artificial
  SHIV env peptide 119
NWRSELYKYKVVKIE

SEQ ID NO: 529 - protein, 15 aa, Artificial
  SHIV env peptide 120
ELYKYKVVKIEPLGV

SEQ ID NO: 530 - protein, 15 aa, Artificial
  SHIV env peptide 121
YKVVKIEPLGVAPTK

SEQ ID NO: 531 - protein, 15 aa, Artificial
  SHIV env peptide 122
KIEPLGVAPTKAKRR

SEQ ID NO: 532 - protein, 15 aa, Artificial
  SHIV env peptide 123
LGVAPTKAKRRVVQR

SEQ ID NO: 533 - protein, 15 aa, Artificial
  SHIV env peptide 124
PTKAKRRVVQREKRA

SEQ ID NO: 534 - protein, 15 aa, Artificial
  SHIV env peptide 125
KRRVVQREKRAVTLG

SEQ ID NO: 535 - protein, 15 aa, Artificial
  SHIV env peptide 126
VQREKRAVTLGAVFL

SEQ ID NO: 536 - protein, 15 aa, Artificial
  SHIV env peptide 127
KRAVTLGAVFLGFLG

SEQ ID NO: 537 - protein, 15 aa, Artificial
  SHIV env peptide 128
TLGAVFLGFLGAAGS

SEQ ID NO: 538 - protein, 15 aa, Artificial
  SHIV env peptide 129
VFLGFLGAAGSTMGA

SEQ ID NO: 539 - protein, 15 aa, Artificial
  SHIV env peptide 130
FLGAAGSTMGAASLT

SEQ ID NO: 540 - protein, 15 aa, Artificial
  SHIV env peptide 131
AGSTMGAASLTLTVQ

SEQ ID NO: 541 - protein, 15 aa, Artificial
  SHIV env peptide 132
MGAASLTLTVQARQL

SEQ ID NO: 542 - protein, 15 aa, Artificial
  SHIV env peptide 133
SLTLTVQARQLLSGI

SEQ ID NO: 543 - protein, 15 aa, Artificial
  SHIV env peptide 134
TVQARQLLSGIVQQQ

SEQ ID NO: 544 - protein, 15 aa, Artificial
  SHIV env peptide 135
RQLLSGIVQQQNNLL

SEQ ID NO: 545 - protein, 15 aa, Artificial
  SHIV env peptide 136
SGIVQQQNNLLRAIE

SEQ ID NO: 546 - protein, 15 aa, Artificial
  SHIV env peptide 137
VQQQNNLLRAIEAQQ

SEQ ID NO: 547 - protein, 15 aa, Artificial
  SHIV env peptide 138
NNLLRAIEAQQRLLQ

SEQ ID NO: 548 - protein, 15 aa, Artificial
  SHIV env peptide 139
RAIEAQQRLLQLTVW

SEQ ID NO: 549 - protein, 15 aa, Artificial
  SHIV env peptide 140
AQQRLLQLTVWGIKQ

SEQ ID NO: 550 - protein, 15 aa, Artificial
  SHIV env peptide 141
LLQLTVWGIKQLQAR

SEQ ID NO: 551 - protein, 15 aa, Artificial
  SHIV env peptide 142
TVWGIKQLQARVLAV

SEQ ID NO: 552 - protein, 15 aa, Artificial
  SHIV env peptide 143
IKQLQARVLAVERYL

SEQ ID NO: 553 - protein, 15 aa, Artificial
  SHIV env peptide 144
LQARVLAVERYLKDQ

SEQ ID NO: 554 - protein, 15 aa, Artificial
  SHIV env peptide 145
VLAVERYLKDQQLLG

SEQ ID NO: 555 - protein, 15 aa, Artificial
  SHIV env peptide 146
ERYLKDQQLLGIWGC

SEQ ID NO: 556 - protein, 15 aa, Artificial
  SHIV env peptide 147
KDQQLLGIWGCSGKL

SEQ ID NO: 557 - protein, 15 aa, Artificial
  SHIV env peptide 148
LLGIWGCSGKLICTT

SEQ ID NO: 558 - protein, 15 aa, Artificial
  SHIV env peptide 149
WGCSGKLICTTAVPW

SEQ ID NO: 559 - protein, 15 aa, Artificial
  SHIV env peptide 150
GKLICTTAVPWNASW

SEQ ID NO: 560 - protein, 15 aa, Artificial
  SHIV env peptide 151
CTTAVPWNASWSNKS

SEQ ID NO: 561 - protein, 15 aa, Artificial
  SHIV env peptide 152
VPWNASWSNKSLDQI

SEQ ID NO: 562 - protein, 15 aa, Artificial
  SHIV env peptide 153
ASWSNKSLDQIWNNM

SEQ ID NO: 563 - protein, 15 aa, Artificial
  SHIV env peptide 154
NKSLDQIWNNMTWME

SEQ ID NO: 564 - protein, 15 aa, Artificial
  SHIV env peptide 155
DQIWNNMTWMEWERE

SEQ ID NO: 565 - protein, 15 aa, Artificial
  SHIV env peptide 156
NNMTWMEWEREIGNY

SEQ ID NO: 566 - protein, 15 aa, Artificial
  SHIV env peptide 157
WMEWEREIGNYTNLI

SEQ ID NO: 567 - protein, 15 aa, Artificial
  SHIV env peptide 158
EREIGNYTNLIYTLI

SEQ ID NO: 568 - protein, 15 aa, Artificial
  SHIV env peptide 159
GNYTNLIYTLIEESQ

SEQ ID NO: 569 - protein, 15 aa, Artificial
  SHIV env peptide 160
NLIYTLIEESQNQQE

SEQ ID NO: 570 - protein, 15 aa, Artificial
  SHIV env peptide 161
TLIEESQNQQEKNEQ

SEQ ID NO: 571 - protein, 15 aa, Artificial
  SHIV env peptide 162
ESQNQQEKNEQELLE

SEQ ID NO: 572 - protein, 15 aa, Artificial
  SHIV env peptide 163
NQQEKNEQELLELDK

SEQ ID NO: 573 - protein, 15 aa, Artificial
  SHIV env peptide 164
KNEQELLELDKWASL

SEQ ID NO: 574 - protein, 15 aa, Artificial
  SHIV env peptide 165
ELLELDKWASLWNWL

SEQ ID NO: 575 - protein, 15 aa, Artificial
  SHIV env peptide 166
LDKWASLWNWLDISK

SEQ ID NO: 576 - protein, 15 aa, Artificial
  SHIV env peptide 167
ASLWNWLDISKWLWY

SEQ ID NO: 577 - protein, 15 aa, Artificial
  SHIV env peptide 168
NWLDISKWLWYIKIF

SEQ ID NO: 578 - protein, 15 aa, Artificial
  SHIV env peptide 169
ISKWLWYIKIFIMIV

SEQ ID NO: 579 - protein, 15 aa, Artificial
  SHIV env peptide 170
LWYIKIFIMIVGGLV

SEQ ID NO: 580 - protein, 15 aa, Artificial
  SHIV env peptide 171
KIFIMIVGGLVGLRI

SEQ ID NO: 581 - protein, 15 aa, Artificial
  SHIV env peptide 172
MIVGGLVGLRIVFTV

SEQ ID NO: 582 - protein, 15 aa, Artificial
  SHIV env peptide 173
GLVGLRIVFTVLSIV

SEQ ID NO: 583 - protein, 15 aa, Artificial
  SHIV env peptide 174
LRIVFTVLSIVNRVR

SEQ ID NO: 584 - protein, 15 aa, Artificial
  SHIV env peptide 175
FTVLSIVNRVRQGYS

SEQ ID NO: 585 - protein, 15 aa, Artificial
  SHIV env peptide 176
SIVNRVRQGYSPLSF

SEQ ID NO: 586 - protein, 15 aa, Artificial
  SHIV env peptide 177
RVRQGYSPLSFQTRF

SEQ ID NO: 587 - protein, 15 aa, Artificial
  SHIV env peptide 178
GYSPLSFQTRFPAPR

SEQ ID NO: 588 - protein, 15 aa, Artificial
  SHIV env peptide 179
LSFQTRFPAPRGLDR

SEQ ID NO: 589 - protein, 15 aa, Artificial
  SHIV env peptide 180
TRFPAPRGLDRPEGI

SEQ ID NO: 590 - protein, 15 aa, Artificial
  SHIV env peptide 181
APRGLDRPEGIEEEG

SEQ ID NO: 591 - protein, 15 aa, Artificial
  SHIV env peptide 182
LDRPEGIEEEGGERD

SEQ ID NO: 592 - protein, 15 aa, Artificial
  SHIV env peptide 183
EGIEEEGGERDRDRS

SEQ ID NO: 593 - protein, 15 aa, Artificial
  SHIV env peptide 184
EEGGERDRDRSRPLV

SEQ ID NO: 594 - protein, 15 aa, Artificial
  SHIV env peptide 185
ERDRDRSRPLVHGLL

SEQ ID NO: 595 - protein, 15 aa, Artificial
  SHIV env peptide 186
DRSRPLVHGLLALIW

SEQ ID NO: 596 - protein, 15 aa, Artificial
  SHIV env peptide 187
PLVHGLLALIWDDLR

SEQ ID NO: 597 - protein, 15 aa, Artificial
  SHIV env peptide 188
GLLALIWDDLRSLCL

SEQ ID NO: 598 - protein, 15 aa, Artificial
  SHIV env peptide 189
LIWDDLRSLCLFSYH

SEQ ID NO: 599 - protein, 15 aa, Artificial
  SHIV env peptide 190
DLRSLCLFSYHRLRD

SEQ ID NO: 600 - protein, 15 aa, Artificial
  SHIV env peptide 191
LCLFSYHRLRDLILI

SEQ ID NO: 601 - protein, 15 aa, Artificial
  SHIV env peptide 192
SYHRLRDLILIAARI

SEQ ID NO: 602 - protein, 15 aa, Artificial
  SIHV env peptide 193
LRDLILIAARIVELL

SEQ ID NO: 603 - protein, 15 aa, Artificial
  SHIV env peptide 194
ILIAARIVELLGRRG

SEQ ID NO: 604 - protein, 15 aa, Artificial
  SHIV env peptide 195
ARIVELLGRRGWEAL

SEQ ID NO: 605 - protein, 15 aa, Artificial
  SHIV env peptide 196
ELLGRRGWEALKYWG

SEQ ID NO: 606 - protein, 15 aa, Artificial
  SHIV env peptide 197
RRGWEALKYWGNLLQ

SEQ ID NO: 607 - protein, 15 aa, Artificial
  SHIV env peptide 198
EALKYWGNLLQYWIQ

SEQ ID NO: 608 - protein, 15 aa, Artificial
  SHIV env peptide 199
YWGNLLQYWIQELKN

SEQ ID NO: 609 - protein, 15 aa, Artificial
  SHIV env peptide 200
LLQYWIQELKNSAVS

SEQ ID NO: 610 - protein, 15 aa, Artificial
  SHIV env peptide 201
WIQELKNSAVSLFGA

SEQ ID NO: 611 - protein, 15 aa, Artificial
  SHIV env peptide 202
LKNSAVSLFGAIAIA

SEQ ID NO: 612 - protein, 15 aa, Artificial
  SHIV env peptide 203
AVSLFGAIAIAVAEG

SEQ ID NO: 613 - protein, 15 aa, Artificial
  SHIV env peptide 204
FGAIAIAVAEGTDRI

SEQ ID NO: 614 - protein, 15 aa, Artificial
  SHIV env peptide 205
AIAVAEGTDRIIEVA

SEQ ID NO: 615 - protein, 15 aa, Artificial
  SHIV env peptide 206
AEGTDRIIEVAQRIG

SEQ ID NO: 616 - protein, 15 aa, Artificial
  SHIV env peptide 207
DRIIEVAQRIGRAFL

SEQ ID NO: 617 - protein, 15 aa, Artificial
  SHIV env peptide 208
EVAQRIGRAFLHIPR

SEQ ID NO: 618 - protein, 15 aa, Artificial
  SHIV env peptide 209
RIGRAFLHIPRRIRQ

SEQ ID NO: 619 - protein, 15 aa, Artificial
  SHIV env peptide 210
AFLHIPRRIRQGLER

SEQ ID NO: 620 - protein, 14 aa, Artificial
  SHIV env peptide 211
IPRRIRQGLERTLL

SEQ ID NO: 621 - protein, 15 aa, Artificial
  HIV-1 gag peptide 1
MGARASVLSGGELDR

SEQ ID NO: 622 - protein, 15 aa, Artificial
  HIV-1 gag peptide 2
ASVLSGGELDRWEKI

SEQ ID NO: 623 - protein, 15 aa, Artificial
  HIV-1 gag peptide 3
SGGELDRWEKIRLRP

SEQ ID NO: 624 - protein, 15 aa, Artificial
  HIV-1 gag peptide 4
LDRWEKIRLRPGGKK

SEQ ID NO: 625 - protein, 15 aa, Artificial
  HIV-1 gag peptide 5
EKIRLRPGGKKKYKL

SEQ ID NO: 626 - protein, 15 aa, Artificial
  HIV-1 gag peptide 6
LRPGGKKKYKLKHIV

SEQ ID NO: 627 - protein, 15 aa, Artificial
  HIV-1 gag peptide 7
GKKKYKLKHIVWASR

SEQ ID NO: 628 - protein, 15 aa, Artificial
  HIV-1 gag peptide 8
YKLKHIVWASRELER

SEQ ID NO: 629 - protein, 15 aa, Artificial
  HIV-1 gag peptide 9
HIVWASRELERFAVN

SEQ ID NO: 630 - protein, 15 aa, Artificial
  HIV-1 gag peptide 10
ASRELERFAVNPGLL

SEQ ID NO: 631 - protein, 15 aa, Artificial
  HIV-1 gag peptide 11
ELERFAVNPGLLETS

SEQ ID NO: 632 - protein, 15 aa, Artificial
  HIV-1 gag peptide 12
FAVNPGLLETSEGCR

SEQ ID NO: 633 - protein, 15 aa, Artificial
  HIV-1 gag peptide 13
PGLLETSEGCRQILG

SEQ ID NO: 634 - protein, 15 aa, Artificial
  HIV-1 gag peptide 14
ETSEGCRQILGQLQP

SEQ ID NO: 635 - protein, 15 aa, Artificial
  HIV-1 gag peptide 15
GCRQILGQLQPSLQT

SEQ ID NO: 636 - protein, 15 aa, Artificial
  HIV-1 gag peptide 16
ILGQLQPSLQTGSEE

SEQ ID NO: 637 - protein, 15 aa, Artificial
  HIV-1 gag peptide 17
LQPSLQTGSEELRSL

SEQ ID NO: 638 - protein, 15 aa, Artificial
  HIV-1 gag peptide 18
LQTGSEELRSLYNTV

SEQ ID NO: 639 - protein, 15 aa, Artificial
  HIV-1 gag peptide 19
SEELRSLYNTVATLY

SEQ ID NO: 640 - protein, 15 aa, Artificial
  HIV-1 gag peptide 20
RSLYNTVATLYCVHQ

SEQ ID NO: 641 - protein, 15 aa, Artificial
  HIV-1 gag peptide 21
NTVATLYCVHQRIEV

SEQ ID NO: 642 - protein, 15 aa, Artificial
  HIV-1 gag peptide 22
TLYCVHQRIEVKDTK

SEQ ID NO: 643 - protein, 15 aa, Artificial
  HIV-1 gag peptide 23
VHQRIEVKDTKEALE

SEQ ID NO: 644 - protein, 15 aa, Artificial
  HIV-1 gag peptide 24
IEVKDTKEALEKIEE

SEQ ID NO: 645 - protein, 15 aa, Artificial
  HIV-1 gag peptide 25
DTKEALEKIEEEQNK

SEQ ID NO: 646 - protein, 15 aa, Artificial
  HIV-1 gag peptide 26
ALEKIEEEQNKSKKK

SEQ ID NO: 647 - protein, 15 aa, Artificial
  HIV-1 gag peptide 27
IEEEQNKSKKKAQQA

SEQ ID NO: 648 - protein, 15 aa, Artificial
  HIV-1 gag peptide 28
QNKSKKKAQQAAADT

SEQ ID NO: 649 - protein, 15 aa, Artificial
  HIV-1 gag peptide 29
KKKAQQAAADTGNSS

SEQ ID NO: 650 - protein, 15 aa, Artificial
  HIV-1 gag peptide 30
QQAAADTGNSSQVSQ

SEQ ID NO: 651 - protein, 15 aa, Artificial
  HIV-1 gag peptide 31
ADTGNSSQVSQNYPI

SEQ ID NO: 652 - protein, 15 aa, Artificial
  HIV-1 gag peptide 32
NSSQVSQNYPIVQNL

SEQ ID NO: 653 - protein, 15 aa, Artificial
  HIV-1 gag peptide 33
VSQNYPIVQNLQGQM

SEQ ID NO: 654 - protein, 15 aa, Artificial
  HIV-1 gag peptide 34
YPIVQNLQGQMVHQA

SEQ ID NO: 655 - protein, 15 aa, Artificial
  HIV-1 gag peptide 35
QNLQGQMVHQAISPR

SEQ ID NO: 656 - protein, 15 aa, Artificial
  HIV-1 gag peptide 36
GQMVHQAISPRTLNA

SEQ ID NO: 657 - protein, 15 aa, Artificial
  HIV-1 gag peptide 37
HQAISPRTLNAWVKV

SEQ ID NO: 658 - protein, 15 aa, Artificial
  HIV-1 gag peptide 38
SPRTLNAWVKVVEEK

SEQ ID NO: 659 - protein, 15 aa, Artificial
  HIV-1 gag peptide 39
LNAWVKVVEEKAFSP

SEQ ID NO: 660 - protein, 15 aa, Artificial
  HIV-1 gag peptide 40
VKVVEEKAFSPEVIP

SEQ ID NO: 661 - protein, 15 aa, Artificial
  HIV-1 gag peptide 41
EEKAFSPEVIPMFSA

SEQ ID NO: 662 - protein, 15 aa, Artificial
  HIV-1 gag peptide 42
FSPEVIPMFSALSEG

SEQ ID NO: 663 - protein, 15 aa, Artificial
  HIV-1 gag peptide 43
VIPMFSALSEGATPQ

SEQ ID NO: 664 - protein, 15 aa, Artificial
  HIV-1 gag peptide 44
FSALSEGATPQDLNT

SEQ ID NO: 665 - protein, 15 aa, Artificial
  HIV-1 gag peptide 45
SEGATPQDLNTMLNT

SEQ ID NO: 666 - protein, 15 aa, Artificial
  HIV-1 gag peptide 46
TPQDLNTMLNTVGGH

SEQ ID NO: 667 - protein, 15 aa, Artificial
  HIV-1 gag peptide 47
LNTMLNTVGGHQAAM

SEQ ID NO: 668 - protein, 15 aa, Artificial
  HIV-1 gag peptide 48
LNTVGGHQAAMQMLK

SEQ ID NO: 669 - protein, 15 aa, Artificial
  HIV-1 gag peptide 49
GGHQAAMQMLKETIN

SEQ ID NO: 670 - protein, 15 aa, Artificial
  HIV-1 gag peptide 50
AAMQMLKETINEEAA

SEQ ID NO: 671 - protein, 15 aa, Artificial
  HIV-1 gag peptide 51
QMLKETINEEAAEWD

SEQ ID NO: 672 - protein, 15 aa, Artificial
  HIV-1 gag peptide 52
ETINEEAAEWDRLHP

SEQ ID NO: 673 - protein, 15 aa, Artificial
  HIV-1 gag peptide 53
EEAAEWDRLHPVHAG

SEQ ID NO: 674 - protein, 15 aa, Artificial
  HIV-1 gag peptide 54
EWDRLHPVHAGPIAP

SEQ ID NO: 675 - protein, 15 aa, Artificial
  HIV-1 gag peptide 55
LHPVHAGPIAPGQMR

SEQ ID NO: 676 - protein, 15 aa, Artificial
  HIV-1 gag peptide 56
HAGPIAPGQMREPRG

SEQ ID NO: 677 - protein, 15 aa, Artificial
  HIV-1 gag peptide 57
IAPGQMREPRGSDIA

SEQ ID NO: 678 - protein, 15 aa, Artificial
  HIV-1 gag peptide 58
QMREPRGSDIAGTTS

SEQ ID NO: 679 - protein, 15 aa, Artificial
  HIV-1 gag peptide 59
PRGSDIAGTTSTLQE

SEQ ID NO: 680 - protein, 15 aa, Artificial
  HIV-1 gag peptide 60
DIAGTTSTLQEQIGW

SEQ ID NO: 681 - protein, 15 aa, Artificial
  HIV-1 gag peptide 61
TTSTLQEQIGWMTNN

SEQ ID NO: 682 - protein, 15 aa, Artificial
  HIV-1 gag peptide 62
LQEQIGWMTNNPPIP

SEQ ID NO: 683 - protein, 15 aa, Artificial
  HIV-1 gag peptide 63
IGWMTNNPPIPVGEI

SEQ ID NO: 684 - protein, 15 aa, Artificial
  HIV-1 gag peptide 64
TNNPPIPVGEIYKRW

SEQ ID NO: 685 - protein, 15 aa, Artificial
  HIV-1 gag peptide 65
PIPVGEIYKRWIILG

SEQ ID NO: 686 - protein, 15 aa, Artificial
  HIV-1 gag peptide 66
GEIYKRWIILGLNKI

SEQ ID NO: 687 - protein, 15 aa, Artificial
  HIV-1 gag peptide 67
KRWIILGLNKIVRMY

SEQ ID NO: 688 - protein, 15 aa, Artificial
  HIV-1 gag peptide 68
ILGLNKIVRMYSPTS

SEQ ID NO: 689 - protein, 15 aa, Artificial
  HIV-1 gag peptide 69
NKIVRMYSPTSILDI

SEQ ID NO: 690 - protein, 15 aa, Artificial
  HIV-1 gag peptide 70
RMYSPTSILDIRQGP

SEQ ID NO: 691 - protein, 15 aa, Artificial
  HIV-1 gag peptide 71
PTSILDIRQGPKEPF

SEQ ID NO: 692 - protein, 15 aa, Artificial
  HIV-1 gag peptide 72
LDIRQGPKEPFRDYV

SEQ ID NO: 693 - protein, 15 aa, Artificial
  HIV-1 gag peptide 73
QGPKEPFRDYVDRFY

SEQ ID NO: 694 - protein, 15 aa, Artificial
  HIV-1 gag peptide 74
EPFRDYVDRFYKTLR

SEQ ID NO: 695 - protein, 15 aa, Artificial
  HIV-1 gag peptide 75
DYVDRFYKTLRAEQA

SEQ ID NO: 696 - protein, 15 aa, Artificial
  HIV-1 gag peptide 76
RFYKTLRAEQASQEV

SEQ ID NO: 697 - protein, 15 aa, Artificial
  HIV-1 gag peptide 77
TLRAEQASQEVKNWM

SEQ ID NO: 698 - protein, 15 aa, Artificial
  HIV-1 gag peptide 78
EQASQEVKNWMTETL

SEQ ID NO: 699 - protein, 15 aa, Artificial
  HIV-1 gag peptide 79
QEVKNWMTETLLVQN

SEQ ID NO: 700 - protein, 15 aa, Artificial
  HIV-1 gag peptide 80
NWMTETLLVQNANPD

SEQ ID NO: 701 - protein, 15 aa, Artificial
  HIV-1 gag peptide 81
ETLLVQNANPDCKTI

SEQ ID NO: 702 - protein, 15 aa, Artificial
  HIV-1 gag peptide 82
VQNANPDCKTILKAL

SEQ ID NO: 703 - protein, 15 aa, Artificial
  HIV-1 gag peptide 83
NPDCKTILKALGPAA

SEQ ID NO: 704 - protein, 15 aa, Artificial
  HIV-1 gag peptide 84
KTILKALGPAATLEE

SEQ ID NO: 705 - protein, 15 aa, Artificial
  HIV-1 gag peptide 85
KALGPAATLEEMMTA

SEQ ID NO: 706 - protein, 15 aa, Artificial
  HIV-1 gag peptide 86
PAATLEEMMTACQGV

SEQ ID NO: 707 - protein, 15 aa, Artificial
  HIV-1 gag peptide 87
LEEMMTACQGVGGPG

SEQ ID NO: 708 - protein, 15 aa, Artificial
  HIV-1 gag peptide 88
MTACQGVGGPGHKAR

SEQ ID NO: 709 - protein, 15 aa, Artificial
  HIV-1 gag peptide 89
QGVGGPGHKARVLAE

SEQ ID NO: 710 - protein, 15 aa, Artificial
  HIV-1 gag peptide 90
GPGHKARVLAEAMSQ

SEQ ID NO: 711 - protein, 15 aa, Artificial
  HIV-1 gag peptide 91
KARVLAEAMSQVTNS

SEQ ID NO: 712 - protein, 15 aa, Artificial
  HIV-1 gag peptide 92
LAEAMSQVTNSATIM

SEQ ID NO: 713 - protein, 15 aa, Artificial
  HIV-1 gag peptide 93
MSQVTNSATIMMQRG

SEQ ID NO: 714 - protein, 15 aa, Artificial
  HIV-1 gag peptide 94
TNSATIMMQRGNFRN

SEQ ID NO: 715 - protein, 15 aa, Artificial
  HIV-1 gag peptide 95
TIMMQRGNFRNQRKT

SEQ ID NO: 716 - protein, 15 aa, Artificial
  HIV-1 gag peptide 96
QRGNFRNQRKTVKCF

SEQ ID NO: 717 - protein, 15 aa, Artificial
  HIV-1 gag peptide 97
FRNQRKTVKCFNCGK

SEQ ID NO: 718 - protein, 15 aa, Artificial
  HIV-1 gag peptide 98
RKTVKCFNCGKEGHI

SEQ ID NO: 719 - protein, 15 aa, Artificial
  HIV-1 gag peptide 99
VKCFNCGKEGHIAKN

SEQ ID NO: 720 - protein, 15 aa, Artificial
  HIV-1 gag peptide 100
NCGKEGHIAKNCRAP

SEQ ID NO: 721 - protein, 15 aa, Artificial
  HIV-1 gag peptide 101
EGHIAKNCRAPRKKG

SEQ ID NO: 722 - protein, 15 aa, Artificial
  HIV-1 gag peptide 102
AKNCRAPRKKGCWKC

SEQ ID NO: 723 - protein, 15 aa, Artificial
  HIV-1 gag peptide 103
RAPRKKGCWKCGKEG

SEQ ID NO: 724 - protein, 15 aa, Artificial
  HIV-1 gag peptide 104
KKGCWKCGKEGHQMK

SEQ ID NO: 725 - protein, 15 aa, Artificial
  HIV-1 gag peptide 105
WKCGKEGHQMKDCTE

SEQ ID NO: 726 - protein, 15 aa, Artificial
  HIV-1 gag peptide 106
KEGHQMKDCTERQAN

SEQ ID NO: 727 - protein, 15 aa, Artificial
  HIV-1 gag peptide 107
QMKDCTERQANFLGK

SEQ ID NO: 728 - protein, 15 aa, Artificial
  HIV-1 gag peptide 108
CTERQANFLGKIWPS

SEQ ID NO: 729 - protein, 15 aa, Artificial
  HIV-1 gag peptide 109
QANFLGKIWPSHKGR

SEQ ID NO: 730 - protein, 15 aa, Artificial
  HIV-1 gag peptide 110
LGKIWPSHKGRPGNF

SEQ ID NO: 731 - protein, 15 aa, Artificial
  HIV-1 gag peptide 111
WPSHKGRPGNFLQSR

SEQ ID NO: 732 - protein, 15 aa, Artificial
  HIV-1 gag peptide 112
KGRPGNFLQSRPEPT

SEQ ID NO: 733 - protein, 15 aa, Artificial
  HIV-1 gag peptide 113
GNFLQSRPEPTAPPE

SEQ ID NO: 734 - protein, 15 aa, Artificial
  HIV-1 gag peptide 114
QSRPEPTAPPEESFR

SEQ ID NO: 735 - protein, 15 aa, Artificial
  HIV-1 gag peptide 115
EPTAPPEESFRFGEE

SEQ ID NO: 736 - protein, 15 aa, Artificial
  HIV-1 gag peptide 116
PPEESFRFGEETTTP

SEQ ID NO: 737 - protein, 15 aa, Artificial
  HIV-1 gag peptide 117
SFRFGEETTTPSQKQ

SEQ ID NO: 738 - protein, 15 aa, Artificial
  HIV-1 gag peptide 118
GEETTTPSQKQEPID

SEQ ID NO: 739 - protein, 15 aa, Artificial
  HIV-1 gag peptide 119
TTTPSQKQEPIDKEL

SEQ ID NO: 740 - protein, 15 aa, Artificial
  HIV-1 gag peptide 120
SQKQEPIDKELYPLA

SEQ ID NO: 741 - protein, 15 aa, Artificial
  HIV-1 gag peptide 121
EPIDKELYPLASLRS

SEQ ID NO: 742 - protein, 15 aa, Artificial
  HIV-1 gag peptide 122
KELYPLASLRSLFGN

SEQ ID NO: 743 - protein, 15 aa, Artificial
  HIV-1 gag peptide 123
PLASLRSLFGNDPSS

SEQ ID NO: 744 - protein, 12 aa, Artificial
  HIV-1 gag peptide 124
LRSLFGNDPSSQ

SEQ ID NO: 745 - protein, 15 aa, Artificial
  HIV-1 nef peptide 1
MGGKWSKRSVVGWPT

SEQ ID NO: 746 - protein, 15 aa, Artificial
  HIV-1 nef peptide 2
WSKRSVVGWPTVRER

SEQ ID NO: 747 - protein, 15 aa, Artificial
  HIV-1 nef peptide 3
SVVGWPTVRERMRRA

SEQ ID NO: 748 - protein, 15 aa, Artificial
  HIV-1 nef peptide 4
WPTVRERMRRAEPAA

SEQ ID NO: 749 - protein, 15 aa, Artificial
  HIV-1 nef peptide 5
RERMRRAEPAADGVG

SEQ ID NO: 750 - protein, 15 aa, Artificial
  HIV-1 nef peptide 6
RRAEPAADGVGAVSR

SEQ ID NO: 751 - protein, 15 aa, Artificial
  HIV-1 nef peptide 7
PAADGVGAVSRDLEK

SEQ ID NO: 752 - protein, 15 aa, Artificial
  HIV-1 nef peptide 8
GVGAVSRDLEKHGAI

SEQ ID NO: 753 - protein, 15 aa, Artificial
  HIV-1 nef peptide 9
VSRDLEKHGAITSSN

SEQ ID NO: 754 - protein, 15 aa, Artificial
  HIV-1 nef peptide 10
LEKHGAITSSNTAAN

SEQ ID NO: 755 - protein, 15 aa, Artificial
  HIV-1 nef peptide 11
GAITSSNTAANNADC

SEQ ID NO: 756 - protein, 15 aa, Artificial
  HIV-1 nef peptide 12
SSNTAANNADCAWLE

SEQ ID NO: 757 - protein, 15 aa, Artificial
  HIV-1 nef peptide 13
AANNADCAWLEAQEE

SEQ ID NO: 758 - protein, 15 aa, Artificial
  HIV-1 nef peptide 14
ADCAWLEAQEEEEVG

SEQ ID NO: 759 - protein, 15 aa, Artificial
  HIV-1 nef peptide 15
WLEAQEEEEVGFPVR

SEQ ID NO: 760 - protein, 15 aa, Artificial
  HIV-1 nef peptide 16
QEEEEVGFPVRPQVP

SEQ ID NO: 761 - protein, 15 aa, Artificial
  HIV-1 nef peptide 17
EVGFPVRPQVPLRPM

SEQ ID NO: 762 - protein, 15 aa, Artificial
  HIV-1 nef peptide 18
PVRPQVPLRPMTYKA

SEQ ID NO: 763 - protein, 15 aa, Artificial
  HIV-1 nef peptide 19
QVPLRPMTYKAAVDL

SEQ ID NO: 764 - protein, 15 aa, Artificial
  HIV-1 nef peptide 20
RPMTYKAAVDLSHFL

SEQ ID NO: 765 - protein, 15 aa, Artificial
  HIV-1 nef peptide 21
YKAAVDLSHFLKEKG

SEQ ID NO: 766 - protein, 15 aa, Artificial
  HIV-1 nef peptide 22
VDLSHFLKEKGGLEG

SEQ ID NO: 767 - protein, 15 aa, Artificial
  HIV-1 nef peptide 23
HFLKEKGGLEGLIYS

SEQ ID NO: 768 - protein, 15 aa, Artificial
  HIV-1 nef peptide 24
EKGGLEGLIYSQKRQ

SEQ ID NO: 769 - protein, 15 aa, Artificial
  HIV-1 nef peptide 25
LEGLIYSQKRQDILD

SEQ ID NO: 770 - protein, 15 aa, Artificial
  HIV-1 nef peptide 26
IYSQKRQDILDLWVY

SEQ ID NO: 771 - protein, 15 aa, Artificial
  HIV-1 nef peptide 27
KRQDILDLWVYHTQG

SEQ ID NO: 772 - protein, 15 aa, Artificial
  HIV-1 nef peptide 28
ILDLWVYHTQGYFPD

SEQ ID NO: 773 - protein, 15 aa, Artificial
  HIV-1 nef peptide 29
WVYHTQGYFPDWQNY

SEQ ID NO: 774 - protein, 15 aa, Artificial
  HIV-1 nef peptide 30
TQGYFPDWQNYTPGP

SEQ ID NO: 775 - protein, 15 aa, Artificial
  HIV-1 nef peptide 31
FPDWQNYTPGPGIRY

SEQ ID NO: 776 - protein, 15 aa, Artificial
  HIV-1 nef peptide 32
QNYTPGPGIRYPLTF

SEQ ID NO: 777 - protein, 15 aa, Artificial
  HIV-1 nef peptide 33
PGPGIRYPLTFGWCF

SEQ ID NO: 778 - protein, 15 aa, Artificial
  HIV-1 nef peptide 34
IRYPLTFGWCFKLVP

SEQ ID NO: 779 - protein, 15 aa, Artificial
  HIV-1 nef peptide 35
LTFGWCFKLVPVEPE

SEQ ID NO: 780 - protein, 15 aa, Artificial
  HIV-1 nef peptide 36
WCFKLVPVEPEKVEE

SEQ ID NO: 781 - protein, 15 aa, Artificial
  HIV-1 nef peptide 37
LVPVEPEKVEEANEG

SEQ ID NO: 782 - protein, 15 aa, Artificial
  HIV-1 nef peptide 38
EPEKVEEANEGENNS

SEQ ID NO: 783 - protein, 15 aa, Artificial
  HIV-1 nef peptide 39
VEEANEGENNSLLHP

SEQ ID NO: 784 - protein, 15 aa, Artificial
  HIV-1 nef peptide 40
NEGENNSLLHPMSLH

SEQ ID NO: 785 - protein, 15 aa, Artificial
  HIV-1 nef peptide 41
NNSLLHPMSLHGMDD

SEQ ID NO: 786 - protein, 15 aa, Artificial
  HIV-1 nef peptide 42
LHPMSLHGMDDPERE

SEQ ID NO: 787 - protein, 15 aa, Artificial
  HIV-1 nef peptide 43
SLHGMDDPEREVLVW

SEQ ID NO: 788 - protein, 15 aa, Artificial
  HIV-1 nef peptide 44
MDDPEREVLVWKFDS

SEQ ID NO: 789 - protein, 15 aa, Artificial
  HIV-1 nef peptide 45
EREVLVWKFDSRLAF

SEQ ID NO: 790 - protein, 15 aa, Artificial
  HIV-1 nef peptide 46
LVWKFDSRLAFHHMA

SEQ ID NO: 791 - protein, 15 aa, Artificial
  HIV-1 nef peptide 47
FDSRLAFHHMARELH

SEQ ID NO: 792 - protein, 15 aa, Artificial
  HIV-1 nef peptide 48
LAFHHMARELHPEYY

SEQ ID NO: 793 - protein, 14 aa, Artificial
  HIV-1 nef peptide 49
HMARELHPEYYKDC

SEQ ID NO: 794 - protein, 15 aa, Artificial
  HIV-1 pol peptide 1
FFREDLAFPQGKARE

SEQ ID NO: 795 - protein, 15 aa, Artificial
  HIV-1 pol peptide 2
DLAFPQGKAREFSSE

SEQ ID NO: 796 - protein, 15 aa, Artificial
  HIV-1 pol peptide 3
PQGKAREFSSEQTRA

SEQ ID NO: 797 - protein, 15 aa, Artificial
  HIV-1 pol peptide 4
AREFSSEQTRANSPT

SEQ ID NO: 798 - protein, 15 aa, Artificial
  HIV-1 pol peptide 5
SSEQTRANSPTRREL

SEQ ID NO: 799 - protein, 15 aa, Artificial
  HIV-1 pol peptide 6
TRANSPTRRELQVWG

SEQ ID NO: 800 - protein, 15 aa, Artificial
  HIV-1 pol peptide 7
SPTRRELQVWGRDNN

SEQ ID NO: 801 - protein, 15 aa, Artificial
  HIV-1 pol peptide 8
RELQVWGRDNNSLSE

SEQ ID NO: 802 - protein, 15 aa, Artificial
  HIV-1 pol peptide 9
VWGRDNNSLSEAGAD

SEQ ID NO: 803 - protein, 15 aa, Artificial
  HIV-1 pol peptide 10
DNNSLSEAGADRQGT

SEQ ID NO: 804 - protein, 15 aa, Artificial
  HIV-1 pol peptide 11
LSEAGADRQGTVSFS

SEQ ID NO: 805 - protein, 15 aa, Artificial
  HIV-1 pol peptide 12
GADRQGTVSFSFPQI

SEQ ID NO: 806 - protein, 15 aa, Artificial
  HIV-1 pol peptide 13
QGTVSFSFPQITLWQ

SEQ ID NO: 807 - protein, 15 aa, Artificial
  HIV-1 pol peptide 14
SFSFPQITLWQRPLV

SEQ ID NO: 808 - protein, 15 aa, Artificial
  HIV-1 pol peptide 15
PQITLWQRPLVTIKI

SEQ ID NO: 809 - protein, 15 aa, Artificial
  HIV-1 pol peptide 16
LWQRPLVTIKIGGQL

SEQ ID NO: 810 - protein, 15 aa, Artificial
  HIV-1 pol peptide 17
PLVTIKIGGQLKEAL

SEQ ID NO: 811 - protein, 15 aa, Artificial
  HIV-1 pol peptide 18
IKIGGQLKEALLDTG

SEQ ID NO: 812 - protein, 15 aa, Artificial
  HIV-1 pol peptide 19
GQLKEALLDTGADDT

SEQ ID NO: 813 - protein, 15 aa, Artificial
  HIV-1 pol peptide 20
EALLDTGADDTVLEE

SEQ ID NO: 814 - protein, 15 aa, Artificial
  HIV-1 pol peptide 21
DTGADDTVLEEMNLP

SEQ ID NO: 815 - protein, 15 aa, Artificial
  HIV-1 pol peptide 22
DDTVLEEMNLPGRWK

SEQ ID NO: 816 - protein, 15 aa, Artificial
  HIV-1 pol peptide 23
LEEMNLPGRWKPKMI

SEQ ID NO: 817 - protein, 15 aa, Artificial
  HIV-1 pol peptide 24
NLPGRWKPKMIGGIG

SEQ ID NO: 818 - protein, 15 aa, Artificial
  HIV-1 pol peptide 25
RWKPKMIGGIGGFIK

SEQ ID NO: 819 - protein, 15 aa, Artificial
  HIV-1 pol peptide 26
KMIGGIGGFIKVRQY

SEQ ID NO: 820 - protein, 15 aa, Artificial
  HIV-1 pol peptide 27
GIGGFIKVRQYDQIL

SEQ ID NO: 821 - protein, 15 aa, Artificial
  HIV-1 pol peptide 28
FIKVRQYDQILIEIC

SEQ ID NO: 822 - protein, 15 aa, Artificial
  HIV-1 pol peptide 29
RQYDQILIEICGHKA

SEQ ID NO: 823 - protein, 15 aa, Artificial
  HIV-1 pol peptide 30
QILIEICGHKAIGTV

SEQ ID NO: 824 - protein, 15 aa, Artificial
  HIV-1 pol peptide 31
EICGHKAIGTVLVGP

SEQ ID NO: 825 - protein, 15 aa, Artificial
  HIV-1 pol peptide 32
HKAIGTVLVGPTPVN

SEQ ID NO: 826 - protein, 15 aa, Artificial
  HIV-1 pol peptide 33
GTVLVGPTPVNIIGR

SEQ ID NO: 827 - protein, 15 aa, Artificial
  HIV-1 pol peptide 34
VGPTPVNIIGRNLLT

SEQ ID NO: 828 - protein, 15 aa, Artificial
  HIV-1 pol peptide 35
PVNIIGRNLLTQIGC

SEQ ID NO: 829 - protein, 15 aa, Artificial
  HIV-1 pol peptide 36
IGRNLLTQIGCTLNF

SEQ ID NO: 830 - protein, 15 aa, Artificial
  HIV-1 pol peptide 37
LLTQIGCTLNFPISP

SEQ ID NO: 831 - protein, 15 aa, Artificial
  HIV-1 pol peptide 38
IGCTLNFPISPIETV

SEQ ID NO: 832 - protein, 15 aa, Artificial
  HIV-1 pol peptide 39
LNFPISPIETVPVKL

SEQ ID NO: 833 - protein, 15 aa, Artificial
  HIV-1 pol peptide 40
ISPIETVPVKLKPGM

SEQ ID NO: 834 - protein, 15 aa, Artificial
  HIV-1 pol peptide 41
ETVPVKLKPGMDGPK

SEQ ID NO: 835 - protein, 15 aa, Artificial
  HIV-1 pol peptide 42
VKLKPGMDGPKVKQW

SEQ ID NO: 836 - protein, 15 aa, Artificial
  HIV-1 pol peptide 43
PGMDGPKVKQWPLTE

SEQ ID NO: 837 - protein, 15 aa, Artificial
  HIV-1 pol peptide 44
GPKVKQWPLTEEKIK

SEQ ID NO: 838 - protein, 15 aa, Artificial
  HIV-1 pol peptide 45
KQWPLTEEKIKALVE

SEQ ID NO: 839 - protein, 15 aa, Artificial
  HIV-1 pol peptide 46
LTEEKIKALVEICTE

SEQ ID NO: 840 - protein, 15 aa, Artificial
  HIV-1 pol peptide 47
KIKALVEICTEMEKE

SEQ ID NO: 841 - protein, 15 aa, Artificial
  HIV-1 pol peptide 48
LVEICTEMEKEGKIS

SEQ ID NO: 842 - protein, 15 aa, Artificial
  HIV-1 pol peptide 49
CTEMEKEGKISKIGP

SEQ ID NO: 843 - protein, 15 aa, Artificial
  HIV-1 pol peptide 50
EKEGKISKIGPENPY

SEQ ID NO: 844 - protein, 15 aa, Artificial
  HIV-1 pol peptide 51
KISKIGPENPYNTPV

SEQ ID NO: 845 - protein, 15 aa, Artificial
  HIV-1 pol peptide 52
IGPENPYNTPVFAIK

SEQ ID NO: 846 - protein, 15 aa, Artificial
  HIV-1 pol peptide 53
NPYNTPVFAIKKKDS

SEQ ID NO: 847 - protein, 15 aa, Artificial
  HIV-1 pol peptide 54
TPVFAIKKKDSTKWR

SEQ ID NO: 848 - protein, 15 aa, Artificial
  HIV-1 pol peptide 55
AIKKKDSTKWRKLVD

SEQ ID NO: 849 - protein, 15 aa, Artificial
  HIV-1 pol peptide 56
KDSTKWRKLVDFREL

SEQ ID NO: 850 - protein, 15 aa, Artificial
  HIV-1 pol peptide 57
KWRKLVDFRELNKRT

SEQ ID NO: 851 - protein, 15 aa, Artificial
  HIV-1 pol peptide 58
LVDFRELNKRTQDFW

SEQ ID NO: 852 - protein, 15 aa, Artificial
  HIV-1 pol peptide 59
RELNKRTQDFWEVQL

SEQ ID NO: 853 - protein, 15 aa, Artificial
  HIV-1 pol peptide 60
KRTQDFWEVQLGIPH

SEQ ID NO: 854 - protein, 15 aa, Artificial
  HIV-1 pol peptide 61
DFWEVQLGIPHPAGL

SEQ ID NO: 855 - protein, 15 aa, Artificial
  HIV-1 pol peptide 62
VQLGIPHPAGLKKKK

SEQ ID NO: 856 - protein, 15 aa, Artificial
  HIV-1 pol peptide 63
IPHPAGLKKKKSVTV

SEQ ID NO: 857 - protein, 15 aa, Artificial
  HIV-1 pol peptide 64
AGLKKKKSVTVLDVG

SEQ ID NO: 858 - protein, 15 aa, Artificial
  HIV-1 pol peptide 65
KKKSVTVLDVGDAYF

SEQ ID NO: 859 - protein, 15 aa, Artificial
  HIV-1 pol peptide 66
VTVLDVGDAYFSVPL

SEQ ID NO: 860 - protein, 15 aa, Artificial
  HIV-1 pol peptide 67
DVGDAYFSVPLDKDF

SEQ ID NO: 861 - protein, 15 aa, Artificial
  HIV-1 pol peptide 68
AYFSVPLDKDFRKYT

SEQ ID NO: 862 - protein, 15 aa, Artificial
  HIV-1 pol peptide 69
VPLDKDFRKYTAFTI

SEQ ID NO: 863 - protein, 15 aa, Artificial
  HIV-1 pol peptide 70
KDFRKYTAFTIPSIN

SEQ ID NO: 864 - protein, 15 aa, Artificial
  HIV-1 pol peptide 71
KYTAFTIPSINNETP

SEQ ID NO: 865 - protein, 15 aa, Artificial
  HIV-1 pol peptide 72
FTIPSINNETPGIRY

SEQ ID NO: 866 - protein, 15 aa, Artificial
  HIV-1 pol peptide 73
SINNETPGIRYQYNV

SEQ ID NO: 867 - protein, 15 aa, Artificial
  HIV-1 pol peptide 74
ETPGIRYQYNVLPQG

SEQ ID NO: 868 - protein, 15 aa, Artificial
  HIV-1 pol peptide 75
IRYQYNVLPQGWKGS

SEQ ID NO: 869 - protein, 15 aa, Artificial
  HIV-1 pol peptide 76
YNVLPQGWKGSPAIF

SEQ ID NO: 870 - protein, 15 aa, Artificial
  HIV-1 pol peptide 77
PQGWKGSPAIFQSSM

SEQ ID NO: 871 - protein, 15 aa, Artificial
  HIV-1 pol peptide 78
KGSPAIFQSSMTKIL

SEQ ID NO: 872 - protein, 15 aa, Artificial
  HIV-1 pol peptide 79
AIFQSSMTKILEPFR

SEQ ID NO: 873 - protein, 15 aa, Artificial
  HIV-1 pol peptide 80
SSMTKILEPFRKQNP

SEQ ID NO: 874 - protein, 15 aa, Artificial
  HIV-1 pol peptide 81
KILEPFRKQNPDIVI

SEQ ID NO: 875 - protein, 15 aa, Artificial
  HIV-1 pol peptide 82
PFRKQNPDIVIYQYM

SEQ ID NO: 876 - protein, 15 aa, Artificial
  HIV-1 pol peptide 83
QNPDIVIYQYMDDLY

SEQ ID NO: 877 - protein, 15 aa, Artificial
  HIV-1 pol peptide 84
IVIYQYMDDLYVGSD

SEQ ID NO: 878 - protein, 15 aa, Artificial
  HIV-1 pol peptide 85
QYMDDLYVGSDLEIG

SEQ ID NO: 879 - protein, 15 aa, Artificial
  HIV-1 pol peptide 86
DLYVGSDLEIGQHRT

SEQ ID NO: 880 - protein, 15 aa, Artificial
  HIV-1 pol peptide 87
GSDLEIGQHRTKIEE

SEQ ID NO: 881 - protein, 15 aa, Artificial
  HIV-1 pol peptide 88
EIGQHRTKIEELRQH

SEQ ID NO: 882 - protein, 15 aa, Artificial
  HIV-1 pol peptide 89
HRTKIEELRQHLLRW

SEQ ID NO: 883 - protein, 15 aa, Artificial
  HIV-1 pol peptide 90
IEELRQHLLRWGFTT

SEQ ID NO: 884 - protein, 15 aa, Artificial
  HIV-1 pol peptide 91
RQHLLRWGFTTPDKK

SEQ ID NO: 885 - protein, 15 aa, Artificial
  HIV-1 pol peptide 92
LRWGFTTPDKKHQKE

SEQ ID NO: 886 - protein, 15 aa, Artificial
  HIV-1 pol peptide 93
FTTPDKKHQKEPPFL

SEQ ID NO: 887 - protein, 15 aa, Artificial
  HIV-1 pol peptide 94
DKKHQKEPPFLWMGY

SEQ ID NO: 888 - protein, 15 aa, Artificial
  HIV-1 pol peptide 95
QKEPPFLWMGYELHP

SEQ ID NO: 889 - protein, 15 aa, Artificial
  HIV-1 pol peptide 96
PFLWMGYELHPDKWT

SEQ ID NO: 890 - protein, 15 aa, Artificial
  HIV-1 pol peptide 97
MGYELHPDKWTVQPI

SEQ ID NO: 891 - protein, 15 aa, Artificial
  HIV-1 pol peptide 98
LHPDKWTVQPIVLPE

SEQ ID NO: 892 - protein, 15 aa, Artificial
  HIV-1 pol peptide 99
KWTVQPIVLPEKDSW

SEQ ID NO: 893 - protein, 15 aa, Artificial
  HIV-1 pol peptide 100
QPIVLPEKDSWTVND

SEQ ID NO: 894 - protein, 15 aa, Artificial
  HIV-1 pol peptide 101
LPEKDSWTVNDIQKL

SEQ ID NO: 895 - protein, 15 aa, Artificial
  HIV-1 pol peptide 102
DSWTVNDIQKLVGKL

SEQ ID NO: 896 - protein, 15 aa, Artificial
  HIV-1 pol peptide 103
VNDIQKLVGKLNWAS

SEQ ID NO: 897 - protein, 15 aa, Artificial
  HIV-1 pol peptide 104
QKLVGKLNWASQIYA

SEQ ID NO: 898 - protein, 15 aa, Artificial
  HIV-1 pol peptide 105
GKLNWASQIYAGIKV

SEQ ID NO: 899 - protein, 15 aa, Artificial
  HIV-1 pol peptide 106
WASQIYAGIKVKQLC

SEQ ID NO: 900 - protein, 15 aa, Artificial
  HIV-1 pol peptide 107
IYAGIKVKQLCKLLR

SEQ ID NO: 901 - protein, 15 aa, Artificial
  HIV-1 pol peptide 108
IKVKQLCKLLRGTKA

SEQ ID NO: 902 - protein, 15 aa, Artificial
  HIV-1 pol peptide 109
QLCKLLRGTKALTEV

SEQ ID NO: 903 - protein, 15 aa, Artificial
  HIV-1 pol peptide 110
LLRGTKALTEVIPLT

SEQ ID NO: 904 - protein, 15 aa, Artificial
  HIV-1 pol peptide 111
TKALTEVIPLTEEAE

SEQ ID NO: 905 - protein, 15 aa, Artificial
  HIV-1 pol peptide 112
TEVIPLTEEAELELA

SEQ ID NO: 906 - protein, 15 aa, Artificial
  HIV-1 pol peptide 113
PLTEEAELELAENRE

SEQ ID NO: 907 - protein, 15 aa, Artificial
  HIV-1 pol peptide 114
EAELELAENREILKE

SEQ ID NO: 908 - protein, 15 aa, Artificial
  HIV-1 pol peptide 115
ELAENREILKEPVHG

SEQ ID NO: 909 - protein, 15 aa, Artificial
  HIV-1 pol peptide 116
NREILKEPVHGVYYD

SEQ ID NO: 910 - protein, 15 aa, Artificial
  HIV-1 pol peptide 117
LKEPVHGVYYDPSKD

SEQ ID NO: 911 - protein, 15 aa, Artificial
  HIV-1 pol peptide 118
VHGVYYDPSKDLIAE

SEQ ID NO: 912 - protein, 15 aa, Artificial
  HIV-1 pol peptide 119
YYDPSKDLIAEIQKQ

SEQ ID NO: 913 - protein, 15 aa, Artificial
  HIV-1 pol peptide 120
SKDLIAEIQKQGQGQ

SEQ ID NO: 914 - protein, 15 aa, Artificial
  HIV-1 pol peptide 121
IAEIQKQGQGQWTYQ

SEQ ID NO: 915 - protein, 15 aa, Artificial
  HIV-1 pol peptide 122
QKQGQGQWTYQIYQE

SEQ ID NO: 916 - protein, 15 aa, Artificial
  HIV-1 pol peptide 123
QGQWTYQIYQEPFKN

SEQ ID NO: 917 - protein, 15 aa, Artificial
  HIV-1 pol peptide 124
TYQIYQEPFKNLKTG

SEQ ID NO: 918 - protein, 15 aa, Artificial
  HIV-1 pol peptide 125
YQEPFKNLKTGKYAR

SEQ ID NO: 919 - protein, 15 aa, Artificial
  HIV-1 pol peptide 126
FKNLKTGKYARMRGA

SEQ ID NO: 920 - protein, 15 aa, Artificial
  HIV-1 pol peptide 127
KTGKYARMRGAHTND

SEQ ID NO: 921 - protein, 15 aa, Artificial
  HIV-1 pol peptide 128
YARMRGAHTNDVKQL

SEQ ID NO: 922 - protein, 15 aa, Artificial
  HIV-1 pol peptide 129
RGAHTNDVKQLTEAV

SEQ ID NO: 923 - protein, 15 aa, Artificial
  HIV-1 pol peptide 130
TNDVKQLTEAVQKIA

SEQ ID NO: 924 - protein, 15 aa, Artificial
  HIV-1 pol peptide 131
KQLTEAVQKIATESI

SEQ ID NO: 925 - protein, 15 aa, Artificial
  HIV-1 pol peptide 132
EAVQKIATESIVIWG

SEQ ID NO: 926 - protein, 15 aa, Artificial
  HIV-1 pol peptide 133
KIATESIVIWGKTPK

SEQ ID NO: 927 - protein, 15 aa, Artificial
  HIV-1 pol peptide 134
ESIVIWGKTPKFKLP

SEQ ID NO: 928 - protein, 15 aa, Artificial
  HIV-1 pol peptide 135
IWGKTPKFKLPIQKE

SEQ ID NO: 929 - protein, 15 aa, Artificial
  HIV-1 pol peptide 136
TPKFKLPIQKETWEA

SEQ ID NO: 930 - protein, 15 aa, Artificial
  HIV-1 pol peptide 137
KLPIQKETWEAWWTE

SEQ ID NO: 931 - protein, 15 aa, Artificial
  HIV-1 pol peptide 138
QKETWEAWWTEYWQA

SEQ ID NO: 932 - protein, 15 aa, Artificial
  HIV-1 pol peptide 139
WEAWWTEYWQATWIP

SEQ ID NO: 933 - protein, 15 aa, Artificial
  HIV-1 pol peptide 140
WTEYWQATWIPEWEF

SEQ ID NO: 934 - protein, 15 aa, Artificial
  HIV-1 pol peptide 141
WQATWIPEWEFVNTP

SEQ ID NO: 935 - protein, 15 aa, Artificial
  HIV-1 pol peptide 142
WIPEWEFVNTPPLVK

SEQ ID NO: 936 - protein, 15 aa, Artificial
  HIV-1 pol peptide 143
WEFVNTPPLVKLWYQ

SEQ ID NO: 937 - protein, 15 aa, Artificial
  HIV-1 pol peptide 144
NTPPLVKLWYQLEKE

SEQ ID NO: 938 - protein, 15 aa, Artificial
  HIV-1 pol peptide 145
LVKLWYQLEKEPIVG

SEQ ID NO: 939 - protein, 15 aa, Artificial
  HIV-1 pol peptide 146
WYQLEKEPIVGAETF

SEQ ID NO: 940 - protein, 15 aa, Artificial
  HIV-1 pol peptide 147
EKEPIVGAETFYVDG

SEQ ID NO: 941 - protein, 15 aa, Artificial
  HIV-1 pol peptide 148
IVGAETFYVDGAANR

SEQ ID NO: 942 - protein, 15 aa, Artificial
  HIV-1 pol peptide 149
ETFYVDGAANRETKL

SEQ ID NO: 943 - protein, 15 aa, Artificial
  HIV-1 pol peptide 150
VDGAANRETKLGKAG

SEQ ID NO: 944 - protein, 15 aa, Artificial
  HIV-1 pol peptide 151
ANRETKLGKAGYVTD

SEQ ID NO: 945 - protein, 15 aa, Artificial
  HIV-1 pol peptide 152
TKLGKAGYVTDRGRQ

SEQ ID NO: 946 - protein, 15 aa, Artificial
  HIV-1 pol peptide 153
KAGYVTDRGRQKVVS

SEQ ID NO: 947 - protein, 15 aa, Artificial
  HIV-1 pol peptide 154
VTDRGRQKVVSLTDT

SEQ ID NO: 948 - protein, 15 aa, Artificial
  HIV-1 pol peptide 155
GRQKVVSLTDTTNQK

SEQ ID NO: 949 - protein, 15 aa, Artificial
  HIV-1 pol peptide 156
VVSLTDTTNQKTELQ

SEQ ID NO: 950 - protein, 15 aa, Artificial
  HIV-1 pol peptide 157
TDTTNQKTELQAIHL

SEQ ID NO: 951 - protein, 15 aa, Artificial
  HIV-1 pol peptide 158
NQKTELQAIHLALQD

SEQ ID NO: 952 - protein, 15 aa, Artificial
  HIV-1 pol peptide 159
ELQAIHLALQDSGLE

SEQ ID NO: 953 - protein, 15 aa, Artificial
  HIV-1 pol peptide 160
IHLALQDSGLEVNIV

SEQ ID NO: 954 - protein, 15 aa, Artificial
  HIV-1 pol peptide 161
LQDSGLEVNIVTDSQ

SEQ ID NO: 955 - protein, 15 aa, Artificial
  HIV-1 pol peptide 162
GLEVNIVTDSQYALG

SEQ ID NO: 956 - protein, 15 aa, Artificial
  HIV-1 pol peptide 163
NIVTDSQYALGIIQA

SEQ ID NO: 957 - protein, 15 aa, Artificial
  HIV-1 pol peptide 164
DSQYALGIIQAQPDK

SEQ ID NO: 958 - protein, 15 aa, Artificial
  HIV-1 pol peptide 165
ALGIIQAQPDKSESE

SEQ ID NO: 959 - protein, 15 aa, Artificial
  HIV-1 pol peptide 166
IQAQPDKSESELVSQ

SEQ ID NO: 960 - protein, 15 aa, Artificial
  HIV-1 pol peptide 167
PDKSESELVSQIIEQ

SEQ ID NO: 961 - protein, 15 aa, Artificial
  HIV-1 pol peptide 168
ESELVSQIIEQLIKK

SEQ ID NO: 962 - protein, 15 aa, Artificial
  HIV-1 pol peptide 169
VSQIIEQLIKKEKVY

SEQ ID NO: 963 - protein, 15 aa, Artificial
  HIV-1 pol peptide 171
IEQLIKKEKVYLAWV

SEQ ID NO: 964 - protein, 15 aa, Artificial
  HIV-1 pol peptide 171
IKKEKVYLAWVPAHK

SEQ ID NO: 965 - protein, 15 aa, Artificial
  HIV-1 pol peptide 172
KVYLAWVPAHKGIGG

SEQ ID NO: 966 - protein, 15 aa, Artificial
  HIV-1 pol peptide 173
AWVPAHKGIGGNEQV

SEQ ID NO: 967 - protein, 15 aa, Artificial
  HIV-1 pol peptide 174
AHKGIGGNEQVDKLV

SEQ ID NO: 968 - protein, 15 aa, Artificial
  HIV-1 pol peptide 175
IGGNEQVDKLVSAGI

SEQ ID NO: 969 - protein, 15 aa, Artificial
  HIV-1 pol peptide 176
EQVDKLVSAGIRKVL

SEQ ID NO: 970 - protein, 15 aa, Artificial
  HIV-1 pol peptide 177
KLVSAGIRKVLFLDG

SEQ ID NO: 971 - protein, 15 aa, Artificial
  HIV-1 pol peptide 178
AGIRKVLFLDGIDKA

SEQ ID NO: 972 - protein, 15 aa, Artificial
  HIV-1 pol peptide 179
KVLFLDGIDKAQEEH

SEQ ID NO: 973 - protein, 15 aa, Artificial
  HIV-1 pol peptide 180
LDGIDKAQEEHEKYH

SEQ ID NO: 974 - protein, 15 aa, Artificial
  HIV-1 pol peptide 181
DKAQEEHEKYHSNWR

SEQ ID NO: 975 - protein, 15 aa, Artificial
  HIV-1 pol peptide 182
EEHEKYHSNWRAMAS

SEQ ID NO: 976 - protein, 15 aa, Artificial
  HIV-1 pol peptide 183
KYHSNWRAMASDFNL

SEQ ID NO: 977 - protein, 15 aa, Artificial
  HIV-1 pol peptide 184
NWRAMASDFNLPPVV

SEQ ID NO: 978 - protein, 15 aa, Artificial
  HIV-1 pol peptide 185
MASDFNLPPVVAKEI

SEQ ID NO: 979 - protein, 15 aa, Artificial
  HIV-1 pol peptide 186
FNLPPVVAKEIVASC

SEQ ID NO: 980 - protein, 15 aa, Artificial
  HIV-1 pol peptide 187
PVVAKEIVASCDKCQ

SEQ ID NO: 981 - protein, 15 aa, Artificial
  HIV-1 pol peptide 188
KEIVASCDKCQLKGE

SEQ ID NO: 982 - protein, 15 aa, Artificial
  HIV-1 pol peptide 189
ASCDKCQLKGEAMHG

SEQ ID NO: 983 - protein, 15 aa, Artificial
  HIV-1 pol peptide 190
KCQLKGEAMHGQVDC

SEQ ID NO: 984 - protein, 15 aa, Artificial
  HIV-1 pol peptide 191
KGEAMHGQVDCSPGI

SEQ ID NO: 985 - protein, 15 aa, Artificial
  HIV-1 pol peptide 192
MHGQVDCSPGIWQLD

SEQ ID NO: 986 - protein, 15 aa, Artificial
  HIV-1 pol peptide 193
VDCSPGIWQLDCTHL

SEQ ID NO: 987 - protein, 15 aa, Artificial
  HIV-1 pol peptide 194
PGIWQLDCTHLEGKI

SEQ ID NO: 988 - protein, 15 aa, Artificial
  HIV-1 pol peptide 195
QLDCTHLEGKIILVA

SEQ ID NO: 989 - protein, 15 aa, Artificial
  HIV-1 pol peptide 196
THLEGKIILVAVHVA

SEQ ID NO: 990 - protein, 15 aa, Artificial
  HIV-1 pol peptide 197
GKIILVAVHVASGYI

SEQ ID NO: 991 - protein, 15 aa, Artificial
  HIV-1 pol peptide 198
LVAVHVASGYIEAEV

SEQ ID NO: 992 - protein, 15 aa, Artificial
  HIV-1 pol peptide 199
HVASGYIEAEVIPAE

SEQ ID NO: 993 - protein, 15 aa, Artificial
  HIV-1 pol peptide 200
GYIEAEVIPAETGQE

SEQ ID NO: 994 - protein, 15 aa, Artificial
  HIV-1 pol peptide 201
AEVIPAETGQETAYF

SEQ ID NO: 995 - protein, 15 aa, Artificial
  HIV-1 pol peptide 202
PAETGQETAYFLLKL

SEQ ID NO: 996 - protein, 15 aa, Artificial
  HIV-1 pol peptide 203
GQETAYFLLKLAGRW

SEQ ID NO: 997 - protein, 15 aa, Artificial
  HIV-1 pol peptide 204
AYFLLKLAGRWPVKT

SEQ ID NO: 998 - protein, 15 aa, Artificial
  HIV-1 pol peptide 205
LKLAGRWPVKTIHTD

SEQ ID NO: 999 - protein, 15 aa, Artificial
  HIV-1 pol peptide 206
GRWPVKTIHTDNGSN

SEQ ID NO: 1000 - protein, 15 aa, Artificial
  HIV-1 pol peptide 207
VKTIHTDNGSNFTST

SEQ ID NO: 1001 - protein, 15 aa, Artificial
  HIV-1 pol peptide 208
HTDNGSNFTSTTVKA

SEQ ID NO: 1002 - protein, 15 aa, Artificial
  HIV-1 pol peptide 209
GSNFTSTTVKAACWW

SEQ ID NO: 1003 - protein, 15 aa, Artificial
  HIV-1 pol peptide 210
TSTTVKAACWWAGIK

SEQ ID NO: 1004 - protein, 15 aa, Artificial
  HIV-1 pol peptide 211
VKAACWWAGIKQEFG

SEQ ID NO: 1005 - protein, 15 aa, Artificial
  HIV-1 pol peptide 212
CWWAGIKQEFGIPYN

SEQ ID NO: 1006 - protein, 15 aa, Artificial
  HIV-1 pol peptide 213
GIKQEFGIPYNPQSQ

SEQ ID NO: 1007 - protein, 15 aa, Artificial
  HIV-1 pol peptide 214
EFGIPYNPQSQGVVE

SEQ ID NO: 1008 - protein, 15 aa, Artificial
  HIV-1 pol peptide 215
PYNPQSQGVVESMNK

SEQ ID NO: 1009 - protein, 15 aa, Artificial
  HIV-1 pol peptide 216
QSQGVVESMNKELKK

SEQ ID NO: 1010 - protein, 15 aa, Artificial
  HIV-1 pol peptide 217
VVESMNKELKKIIGQ

SEQ ID NO: 1011 - protein, 15 aa, Artificial
  HIV-1 pol peptide 218
MNKELKKIIGQVRDQ

SEQ ID NO: 1012 - protein, 15 aa, Artificial
  HIV-1 pol peptide 219
LKKIIGQVRDQAEHL

SEQ ID NO: 1013 - protein, 15 aa, Artificial
  HIV-1 pol peptide 220
IGQVRDQAEHLKTAV

SEQ ID NO: 1014 - protein, 15 aa, Artificial
  HIV-1 pol peptide 221
RDQAEHLKTAVQMAV

SEQ ID NO: 1015 - protein, 15 aa, Artificial
  HIV-1 pol peptide 222
EHLKTAVQMAVFIHN

SEQ ID NO: 1016 - protein, 15 aa, Artificial
  HIV-1 pol peptide 223
TAVQMAVFIHNFKRK

SEQ ID NO: 1017 - protein, 15 aa, Artificial
  HIV-1 pol peptide 224
MAVFIHNFKRKGGIG

SEQ ID NO: 1018 - protein, 15 aa, Artificial
  HIV-1 pol peptide 225
IHNFKRKGGIGGYSA

SEQ ID NO: 1019 - protein, 15 aa, Artificial
  HIV-1 pol peptide 226
KRKGGIGGYSAGERI

SEQ ID NO: 1020 - protein, 15 aa, Artificial
  HIV-1 pol peptide 227
GIGGYSAGERIVDII

SEQ ID NO: 1021 - protein, 15 aa, Artificial
  HIV-1 pol peptide 228
YSAGERIVDIIATDI

SEQ ID NO: 1022 - protein, 15 aa, Artificial
  HIV-1 pol peptide 229
ERIVDIIATDIQTKE

SEQ ID NO: 1023 - protein, 15 aa, Artificial
  HIV-1 pol peptide 230
DIIATDIQTKELQKQ

SEQ ID NO: 1024 - protein, 15 aa, Artificial
  HIV-1 pol peptide 231
TDIQTKELQKQITKI

SEQ ID NO: 1025 - protein, 15 aa, Artificial
  HIV-1 pol peptide 232
TKELQKQITKIQNFR

SEQ ID NO: 1026 - protein, 15 aa, Artificial
  HIV-1 pol peptide 233
QKQITKIQNFRVYRD

SEQ ID NO: 1027 - protein, 15 aa, Artificial
  HIV-1 pol peptide 234
TKIQNFRVYRDSRDP

SEQ ID NO: 1028 - protein, 15 aa, Artificial
  HIV-1 pol peptide 235
NFRVYRDSRDPLWKG

SEQ ID NO: 1029 - protein, 15 aa, Artificial
  HIV-1 pol peptide 236
YRDSRDPLWKGPAKL

SEQ ID NO: 1030 - protein, 15 aa, Artificial
  HIV-1 pol peptide 237
RDPLWKGPAKLLWKG

SEQ ID NO: 1031 - protein, 15 aa, Artificial
  HIV-1 pol peptide 238
WKGPAKLLWKGEGAV

SEQ ID NO: 1032 - protein, 15 aa, Artificial
  HIV-1 pol peptide 239
AKLLWKGEGAVVIQD

SEQ ID NO: 1033 - protein, 15 aa, Artificial
  HIV-1 pol peptide 240
WKGEGAVVIQDNSDI

SEQ ID NO: 1034 - protein, 15 aa, Artificial
  HIV-1 pol peptide 241
GAVVIQDNSDIKVVP

SEQ ID NO: 1035 - protein, 15 aa, Artificial
  HIV-1 pol peptide 242
IQDNSDIKVVPRRKA

SEQ ID NO: 1036 - protein, 15 aa, Artificial
  HIV-1 pol peptide 243
SDIKVVPRRKAKIIR

SEQ ID NO: 1037 - protein, 15 aa, Artificial
  HIV-1 pol peptide 244
VVPRRKAKIIRDYGK

SEQ ID NO: 1038 - protein, 15 aa, Artificial
  HIV-1 pol peptide 245
RKAKIIRDYGKQMAG

SEQ ID NO: 1039 - protein, 15 aa, Artificial
  HIV-1 pol peptide 246
IIRDYGKQMAGDDCV

SEQ ID NO: 1040 - protein, 15 aa, Artificial
  HIV-1 pol peptide 247
YGKQMAGDDCVASRQ

SEQ ID NO: 1041 - protein, 14 aa, Artificial
  HIV-1 pol peptide 248
MAGDDCVASRQDED

SEQ ID NO: 1042 - protein, 16 aa, Artificial
  HIV-1 rev peptide 1
MAGRSGDSDEELLKTL

SEQ ID NO: 1043 - protein, 16 aa, Artificial
  HIV-1 rev peptide 2
SGDSDEELLKTVRLIC

SEQ ID NO: 1044 - protein, 16 aa, Artificial
  HIV-1 rev peptide 3
DEELLKTVRLIKFLYC

SEQ ID NO: 1045 - protein, 16 aa, Artificial
  HIV-1 rev peptide 4
LKTVRLIKFLYQSNPG

SEQ ID NO: 1046 - protein, 16 aa, Artificial
  HIV-1 rev peptide 5
RLIKFLYQSNPPPSPV

SEQ ID NO: 1047 - protein, 16 aa, Artificial
  HIV-1 rev peptide 6
FLYQSNPPPSPEGTRQ

SEQ ID NO: 1048 - protein, 16 aa, Artificial
  HIV-1 rev peptide 7
SNPPPSPEGTRQARRE

SEQ ID NO: 1049 - protein, 15 aa, Artificial
  HIV-1 rev peptide 8
PSPEGTRQARRNRRR

SEQ ID NO: 1050 - protein, 15 aa, Artificial
  HIV-1 rev peptide 9
GTRQARRNRRRRWRE

SEQ ID NO: 1051 - protein, 15 aa, Artificial
  HIV-1 rev peptide 10
ARRNRRRRWRERQRQ

SEQ ID NO: 1052 - protein, 15 aa, Artificial
  HIV-1 rev peptide 11
RRRRWRERQRQIRSI

SEQ ID NO: 1053 - protein, 15 aa, Artificial
  HIV-1 rev peptide 12
WRERQRQIRSISEWI

SEQ ID NO: 1054 - protein, 15 aa, Artificial
  HIV-1 rev peptide 13
QRQIRSISEWILSTY

SEQ ID NO: 1055 - protein, 15 aa, Artificial
  HIV-1 rev peptide 14
RSISEWILSTYLGRP

SEQ ID NO: 1056 - protein, 15 aa, Artificial
  HIV-1 rev peptide 15
EWILSTYLGRPAEPV

SEQ ID NO: 1057 - protein, 15 aa, Artificial
  HIV-1 rev peptide 16
STYLGRPAEPVPLQL

SEQ ID NO: 1058 - protein, 15 aa, Artificial
  HIV-1 rev peptide 17
GRPAEPVPLQLPPLE

SEQ ID NO: 1059 - protein, 15 aa, Artificial
  HIV-1 rev peptide 18
EPVPLQLPPLERLTL

SEQ ID NO: 1060 - protein, 15 aa, Artificial
  HIV-1 rev peptide 19
LQLPPLERLTLDCNE

SEQ ID NO: 1061 - protein, 15 aa, Artificial
  HIV-1 rev peptide 20
PLERLTLDCNEDCGT

SEQ ID NO: 1062 - protein, 14 aa, Artificial
  HIV-1 rev peptide 21
TLDCNEDCGTSGTQ

SEQ ID NO: 1063 - protein, 14 aa, Artificial
  HIV-1 rev peptide 22
NEDCGTSGTQGVGS

SEQ ID NO: 1064 - protein, 14 aa, Artificial
  HIV-1 rev peptide 23
GTSGTQGVGSPQIL

SEQ ID NO: 1065 - protein, 14 aa, Artificial
  HIV-1 rev peptide 24
TQGVGSPQILVESP

SEQ ID NO: 1066 - protein, 14 aa, Artificial
  HIV-1 rev peptide 25
GSPQILVESPAVLE

SEQ ID NO: 1067 - protein, 14 aa, Artificial
  HIV-1 rev peptide 26
ILVESPAVLESGTK

SEQ ID NO: 1068 - protein, 12 aa, Artificial
  HIV-1 rev peptide 27
SPAVLESGTKEE

SEQ ID NO: 1069 - protein, 16 aa, Artificial
  HIV-1 tat peptide 1
MEPVDPRLEPWKHPGP

SEQ ID NO: 1070 - protein, 16 aa, Artificial
  HIV-1 tat peptide 2
DPRLEPWKHPGSQPKP

SEQ ID NO: 1071 - protein, 16 aa, Artificial
  HIV-1 tat peptide 3
EPWKHPGSQPKTACTK

SEQ ID NO: 1072 - protein, 16 aa, Artificial
  HIV-1 tat peptide 4
HPGSQPKTACTNCYCK

SEQ ID NO: 1073 - protein, 15 aa, Artificial
  HIV-1 tat peptide 5
QPKTACTNCYCKKCC

SEQ ID NO: 1074 - protein, 15 aa, Artificial
  HIV-1 tat peptide 6
ACTNCYCKKCCFHCQ

SEQ ID NO: 1075 - protein, 15 aa, Artificial
  HIV-1 tat peptide 7
CYCKKCCFHCQVCFI

SEQ ID NO: 1076 - protein, 15 aa, Artificial
  HIV-1 tat peptide 8
KCCFHCQVCFITKGL

SEQ ID NO: 1077 - protein, 15 aa, Artificial
  HIV-1 tat peptide 9
HCQVCFITKGLGISY

SEQ ID NO: 1078 - protein, 15 aa, Artificial
  HIV-1 tat peptide 10
CFITKGLGISYGRKK

SEQ ID NO: 1079 - protein, 15 aa, Artificial
  HIV-1 tat peptide 11
KGLGISYGRKKRRQR

SEQ ID NO: 1080 - protein, 15 aa, Artificial
  HIV-1 tat peptide 12
ISYGRKKRRQRRRAP

SEQ ID NO: 1081 - protein, 15 aa, Artificial
  HIV-1 tat peptide 13
RKKRRQRRRAPQDSQ

SEQ ID NO: 1082 - protein, 15 aa, Artificial
  HIV-1 tat peptide 14
RQRRRAPQDSQTHQV

SEQ ID NO: 1083 - protein, 15 aa, Artificial
  HIV-1 tat peptide 15
RAPQDSQTHQVSLSK

SEQ ID NO: 1084 - protein, 15 aa, Artificial
  HIV-1 tat peptide 16
DSQTHQVSLSKQPAS

SEQ ID NO: 1085 - protein, 15 aa, Artificial
  HIV-1 tat peptide 17
HQVSLSKQPASQPRG

SEQ ID NO: 1086 - protein, 15 aa, Artificial
  HIV-1 tat peptide 18
LSKQPASQPRGDPTG

SEQ ID NO: 1087 - protein, 15 aa, Artificial
  HIV-1 tat peptide 19
PASQPRGDPTGPKES

SEQ ID NO: 1088 - protein, 14 aa, Artificial
  HIV-1 tat peptide 20
RGDPTGPKESKKKV

SEQ ID NO: 1089 - protein, 14 aa, Artificial
  HIV-1 tat peptide 21
TGPKESKKKVERET

SEQ ID NO: 1090 - protein, 14 aa, Artificial
  HIV-1 tat peptide 22
ESKKKVERETETDP

SEQ ID NO: 1091 - protein, 13 aa, Artificial
  HIV-1 tat peptide 23
KVERETETDPVDQ

SEQ ID NO: 1092 - protein, 15 aa, Artificial
  HIV-1 vif peptide 1
MENRWQVMIVWQVDR

SEQ ID NO: 1093 - protein, 15 aa, Artificial
  HIV-1 vif peptide 2
WQVMIVWQVDRMRIR

SEQ ID NO: 1094 - protein, 15 aa, Artificial
  HIV-1 vif peptide 3
IVWQVDRMRIRTWKS

SEQ ID NO: 1095 - protein, 15 aa, Artificial
  HIV-1 vif peptide 4
VDRMRIRTWKSLVKH

SEQ ID NO: 1096 - protein, 15 aa, Artificial
  HIV-1 vif peptide 5
RIRTWKSLVKHHMYI

SEQ ID NO: 1097 - protein, 15 aa, Artificial
  HIV-1 vif peptide 6
WKSLVKHHMYISRKA

SEQ ID NO: 1098 - protein, 15 aa, Artificial
  HIV-1 vif peptide 7
VKHHMYISRKAKGWF

SEQ ID NO: 1099 - protein, 15 aa, Artificial
  HIV-1 vif peptide 8
MYISRKAKGWFYRHH

SEQ ID NO: 1100 - protein, 15 aa, Artificial
  HIV-1 vif peptide 9
RKAKGWFYRHHYEST

SEQ ID NO: 1101 - protein, 15 aa, Artificial
  HIV-1 vif peptide 10
GWFYRHHYESTHPRI

SEQ ID NO: 1102 - protein, 15 aa, Artificial
  HIV-1 vif peptide 11
RHHYESTHPRISSEV

SEQ ID NO: 1103 - protein, 15 aa, Artificial
  HIV-1 vif peptide 12
ESTHPRISSEVHIPL

SEQ ID NO: 1104 - protein, 15 aa, Artificial
  HIV-1 vif peptide 13
PRISSEVHIPLGDAR

SEQ ID NO: 1105 - protein, 15 aa, Artificial
  HIV-1 vif peptide 14
SEVHIPLGDARLVIT

SEQ ID NO: 1106 - protein, 15 aa, Artificial
  HIV-1 vif peptide 15
IPLGDARLVITTYWG

SEQ ID NO: 1107 - protein, 15 aa, Artificial
  HIV-1 vif peptide 16
DARLVITTYWGLHTG

SEQ ID NO: 1108 - protein, 15 aa, Artificial
  HIV-1 vif peptide 17
VITTYWGLHTGERDW

SEQ ID NO: 1109 - protein, 15 aa, Artificial
  HIV-1 vif peptide 18
YWGLHTGERDWHLGQ

SEQ ID NO: 1110 - protein, 15 aa, Artificial
  HIV-1 vif peptide 19
HTGERDWHLGQGVSI

SEQ ID NO: 1111 - protein, 15 aa, Artificial
  HIV-1 vif peptide 20
RDWHLGQGVSIEWRK

SEQ ID NO: 1112 - protein, 15 aa, Artificial
  HIV-1 vif peptide 21
LGQGVSIEWRKKRYS

SEQ ID NO: 1113 - protein, 15 aa, Artificial
  HIV-1 vif peptide 22
VSIEWRKKRYSTQVD

SEQ ID NO: 1114 - protein, 15 aa, Artificial
  HIV-1 vif peptide 23
WRKKRYSTQVDPDLA

SEQ ID NO: 1115 - protein, 15 aa, Artificial
  HIV-1 vif peptide 24
RYSTQVDPDLADQLI

SEQ ID NO: 1116 - protein, 15 aa, Artificial
  HIV-1 vif peptide 25
QVDPDLADQLIHLYY

SEQ ID NO: 1117 - protein, 15 aa, Artificial
  HIV-1 vif peptide 26
DLADQLIHLYYFDCF

SEQ ID NO: 1118 - protein, 15 aa, Artificial
  HIV-1 vif peptide 27
QLIHLYYFDCFSESA

SEQ ID NO: 1119 - protein, 15 aa, Artificial
  HIV-1 vif peptide 28
LYYFDCFSESAIRNA

SEQ ID NO: 1120 - protein, 15 aa, Artificial
  HIV-1 vif peptide 29
DCFSESAIRNAILGH

SEQ ID NO: 1121 - protein, 15 aa, Artificial
  HIV-1 vif peptide 30
ESAIRNAILGHIVSP

SEQ ID NO: 1122 - protein, 15 aa, Artificial
  HIV-1 vif peptide 31
RNAILGHIVSPRCEY

SEQ ID NO: 1123 - protein, 15 aa, Artificial
  HIV-1 vif peptide 32
LGHIVSPRCEYQAGH

SEQ ID NO: 1124 - protein, 15 aa, Artificial
  HIV-1 vif peptide 33
VSPRCEYQAGHNKVG

SEQ ID NO: 1125 - protein, 15 aa, Artificial
  HIV-1 vif peptide 34
CEYQAGHNKVGSLQY

SEQ ID NO: 1126 - protein, 15 aa, Artificial
  HIV-1 vif peptide 35
AGHNKVGSLQYLALA

SEQ ID NO: 1127 - protein, 15 aa, Artificial
  HIV-1 vif peptide 36
KVGSLQYLALAALIT

SEQ ID NO: 1128 - protein, 15 aa, Artificial
  HIV-1 vif peptide 37
LQYLALAALITPKKI

SEQ ID NO: 1129 - protein, 15 aa, Artificial
  HIV-1 vif peptide 38
ALAALITPKKIKPPL

SEQ ID NO: 1130 - protein, 15 aa, Artificial
  HIV-1 vif peptide 39
LITPKKIKPPLPSVT

SEQ ID NO: 1131 - protein, 15 aa, Artificial
  HIV-1 vif peptide 40
KKIKPPLPSVTKLTE

SEQ ID NO: 1132 - protein, 16 aa, Artificial
  HIV-1 vif peptide 41
PPLPSVTKLTEDRWNK

SEQ ID NO: 1133 - protein, 15 aa, Artificial
  HIV-1 vif peptide 42
PPLPSVTKLTEDRWN

SEQ ID NO: 1134 - protein, 15 aa, Artificial
  HIV-1 vif peptide 43
SVTKLTEDRWNKPQK

SEQ ID NO: 1135 - protein, 15 aa, Artificial
  HIV-1 vif peptide 44
LTEDRWNKPQKTKGH

SEQ ID NO: 1136 - protein, 15 aa, Artificial
  HIV-1 vif peptide 45
RWNKPQKTKGHRGSH

SEQ ID NO: 1137 - protein, 15 aa, Artificial
  HIV-1 vif peptide 46
PQKTKGHRGSHTMNG

SEQ ID NO: 1138 - protein, 12 aa, Artificial
  HIV-1 vif peptide 47
KGHRGSHTMNGH

SEQ ID NO: 1139 - protein, 16 aa, Artificial
  HIV-1 vif peptide 48
PQKTKGHRGSHTMNGH

SEQ ID NO: 1140 - protein, 16 aa, Artificial
  HIV-1 vpr peptide 1
MEQAPEDQGPQREPYI

SEQ ID NO: 1141 - protein, 16 aa, Artificial
  HIV-1 vpr peptide 2
PEDQGPQREPYNEWTR

SEQ ID NO: 1142 - protein, 15 aa, Artificial
  HIV-1 vpr peptide 3
GPQREPYNEWTLELL

SEQ ID NO: 1143 - protein, 15 aa, Artificial
  HIV-1 vpr peptide 4
EPYNEWTLELLEELK

SEQ ID NO: 1144 - protein, 15 aa, Artificial
  HIV-1 vpr peptide 5
EWTLELLEELKSEAV

SEQ ID NO: 1145 - protein, 15 aa, Artificial
  HIV-1 vpr peptide 6
ELLEELKSEAVRHFP

SEQ ID NO: 1146 - protein, 15 aa, Artificial
  HIV-1 vpr peptide 7
ELKSEAVRHFPRIWL

SEQ ID NO: 1147 - protein, 15 aa, Artificial
  HIV-1 vpr peptide 8
EAVRHFPRIWLHGLG

SEQ ID NO: 1148 - protein, 15 aa, Artificial
  HIV-1 vpr peptide 9
HFPRIWLHGLGQHIY

SEQ ID NO: 1149 - protein, 15 aa, Artificial
  HIV-1 vpr peptide 10
IWLHGLGQHIYETYG

SEQ ID NO: 1150 - protein, 15 aa, Artificial
  HIV-1 vpr peptide 11
GLGQHIYETYGDTWA

SEQ ID NO: 1151 - protein, 15 aa, Artificial
  HIV-1 vpr peptide 12
HIYETYGDTWAGVEA

SEQ ID NO: 1152 - protein, 15 aa, Artificial
  HIV-1 vpr peptide 13
TYGDTWAGVEAIIRI

SEQ ID NO: 1153 - protein, 15 aa, Artificial
  HIV-1 vpr peptide 14
TWAGVEAIIRILQQL

SEQ ID NO: 1154 - protein, 15 aa, Artificial
  HIV-1 vpr peptide 15
VEAIIRILQQLLFIH

SEQ ID NO: 1155 - protein, 15 aa, Artificial
  HIV-1 vpr peptide 16
IRILQQLLFIHFRIG

SEQ ID NO: 1156 - protein, 15 aa, Artificial
  HIV-1 vpr peptide 17
QQLLFIHFRIGCQHS

SEQ ID NO: 1157 - protein, 15 aa, Artificial
  HIV-1 vpr peptide 18
FIHFRIGCQHSRIGI

SEQ ID NO: 1158 - protein, 15 aa, Artificial
  HIV-1 vpr peptide 19
RIGCQHSRIGITRQR

SEQ ID NO: 1159 - protein, 15 aa, Artificial
  HIV-1 vpr peptide 20
QHSRIGITRQRRARN

SEQ ID NO: 1160 - protein, 14 aa, Artificial
  HIV-1 vpr peptide 21
GITRQRRARNGASR

SEQ ID NO: 1161 - protein, 11 aa, Artificial
  HIV-1 vpr peptide 22
QRRARNGASRS

SEQ ID NO: 1162 - protein, 15 aa, Artificial
  HIV-1 vpu peptide 1
MQSLQILAIVALVVA

SEQ ID NO: 1163 - protein, 15 aa, Artificial
  HIV-1 vpu peptide 2
QILAIVALVVAAIIA

SEQ ID NO: 1164 - protein, 15 aa, Artificial
  HIV-1 vpu peptide 3
IVALVVAAIIAIVVW

SEQ ID NO: 1165 - protein, 15 aa, Artificial
  HIV-1 vpu peptide 4
VVAAIIAIVVWSIVF

SEQ ID NO: 1166 - protein, 15 aa, Artificial
  HIV-1 vpu peptide 5
IIAIVVWSIVFIEYR

SEQ ID NO: 1167 - protein, 15 aa, Artificial
  HIV-1 vpu peptide 6
VVWSIVFIEYRKILR

SEQ ID NO: 1168 - protein, 15 aa, Artificial
  HIV-1 vpu peptide 7
IVFIEYRKILRQRKI

SEQ ID NO: 1169 - protein, 15 aa, Artificial
  HIV-1 vpu peptide 8
EYRKILRQRKIDRLI

SEQ ID NO: 1170 - protein, 15 aa, Artificial
  HIV-1 vpu peptide 9
ILRQRKIDRLIDRIR

SEQ ID NO: 1171 - protein, 15 aa, Artificial
  HIV-1 vpu peptide 10
RKIDRLIDRIRERAE

SEQ ID NO: 1172 - protein, 15 aa, Artificial
  HIV-1 vpu peptide 11
RLIDRIRERAEDSGN

SEQ ID NO: 1173 - protein, 15 aa, Artificial
  HIV-1 vpu peptide 12
RIRERAEDSGNESEG

SEQ ID NO: 1174 - protein, 15 aa, Artificial
  HIV-1 vpu peptide 13
RAEDSGNESEGDQEE

SEQ ID NO: 1175 - protein, 15 aa, Artificial
  HIV-1 vpu peptide 14
SGNESEGDQEELSAL

SEQ ID NO: 1176 - protein, 15 aa, Artificial
  HIV-1 vpu peptide 15
SEGDQEELSALVEMG

SEQ ID NO: 1177 - protein, 15 aa, Artificial
  HIV-1 vpu peptide 16
QEELSALVEMGHHAP

SEQ ID NO: 1178 - protein, 15 aa, Artificial
  HIV-1 vpu peptide 17
SALVEMGHHAPWDVD

SEQ ID NO: 1179 - protein, 13 aa, Artificial
  HIV-1 vpu peptide 18
EMGHHAPWDVDDL

SEQ ID NO: 1180 - protein, 18 aa, Hepatitis C virus
MSTNPKPQRKTKRNTNRR

SEQ ID NO: 1181 - protein, 18 aa, Hepatitis C virus
QRKTKRNTNRRPQDVKFP

SEQ ID NO: 1182 - protein, 18 aa, Hepatitis C virus
TNRRPQDVKFPGGGQIVG

SEQ ID NO: 1183 - protein, 18 aa, Hepatitis C virus
VKFPGGGQIVGGVYLLPR

SEQ ID NO: 1184 - protein, 18 aa, Hepatitis C virus
QIVGGVYLLPRRGPRLGV

SEQ ID NO: 1185 - protein, 18 aa, Hepatitis C virus
LLPRRGPRLGVRATRKTS

SEQ ID NO: 1186 - protein, 18 aa, Hepatitis C virus
RLGVRATRKTSERSQPRG

SEQ ID NO: 1187 - protein, 18 aa, Hepatitis C virus
RKTSERSQPRGRRQPIPK

SEQ ID NO: 1188 - protein, 18 aa, Hepatitis C virus
QPRGRRQPIPKARRPEGR

SEQ ID NO: 1189 - protein, 18 aa, Hepatitis C virus
PIPKARRPEGRTWAQPGY

SEQ ID NO: 1190 - protein, 18 aa, Hepatitis C virus
PEGRTWAQPGYPWPLYGN

SEQ ID NO: 1191 - protein, 18 aa, Hepatitis C virus
QPGYPWPLYGNEGCGWAG

SEQ ID NO: 1192 - protein, 18 aa, Hepatitis C virus
LYGNEGCGWAGWLLSPRG

SEQ ID NO: 1193 - protein, 18 aa, Hepatitis C virus
GWAGWLLSPRGSRPSWGP

SEQ ID NO: 1194 - protein, 18 aa, Hepatitis C virus
SPRGSRPSWGPTDPRRRS

SEQ ID NO: 1195 - protein, 18 aa, Hepatitis C virus
SWGPTDPRRRSRNLGKVI

SEQ ID NO: 1196 - protein, 18 aa, Hepatitis C virus
RRRSRNLGKVIDTLTCGF

SEQ ID NO: 1197 - protein, 18 aa, Hepatitis C virus
GKVIDTLTCGFADLMGYI

SEQ ID NO: 1198 - protein, 18 aa, Hepatitis C virus
TCGFADLMGYIPLVGAPL

SEQ ID NO: 1199 - protein, 18 aa, Hepatitis C virus
MGYIPLVGAPLGGAARAL

SEQ ID NO: 1200 - protein, 18 aa, Hepatitis C virus
GAPLGGAARALAHGVRVL

SEQ ID NO: 1201 - protein, 18 aa, Hepatitis C virus
ARALAHGVRVLEDGVNYA

SEQ ID NO: 1202 - protein, 18 aa, Hepatitis C virus
VRVLEDGVNYATGNLPGC

SEQ ID NO: 1203 - protein, 18 aa, Hepatitis C virus
VNYATGNLPGCSFSIFLL

SEQ ID NO: 1204 - protein, 15 aa, Hepatitis C virus
LPGCSFSIFLLALLS

SEQ ID NO: 1205 - protein, 14 aa, Hepatitis C virus
SFSIFLLALLSCLT

SEQ ID NO: 1206 - protein, 18 aa, Hepatitis C virus
IFLLALLSCLTVPASAYQ

SEQ ID NO: 1207 - protein, 18 aa, Hepatitis C virus
SCLTVPASAYQVRNSSGL

SEQ ID NO: 1208 - protein, 18 aa, Hepatitis C virus
SAYQVRNSSGLYHVTNDC

SEQ ID NO: 1209 - protein, 18 aa, Hepatitis C virus
SSGLYHVTNDCPNSSIVY

SEQ ID NO: 1210 - protein, 18 aa, Hepatitis C virus
TNDCPNSSIVYEAADAIL

SEQ ID NO: 1211 - protein, 18 aa, Hepatitis C virus
SIVYEAADAILHTPGCVP

SEQ ID NO: 1212 - protein, 18 aa, Hepatitis C virus
DAILHTPGCVPCVREGNA

SEQ ID NO: 1213 - protein, 18 aa, Hepatitis C virus
GCVPCVREGNASRCWVAV

SEQ ID NO: 1214 - protein, 18 aa, Hepatitis C virus
EGNASRCWVAVTPTVATR

SEQ ID NO: 1215 - protein, 18 aa, Hepatitis C virus
WVAVTPTVATRDGKLPTT

SEQ ID NO: 1216 - protein, 18 aa, Hepatitis C virus
VATRDGKLPTTQLRRHID

SEQ ID NO: 1217 - protein, 18 aa, Hepatitis C virus
LPTTQLRRHIDLLVGSAT

SEQ ID NO: 1218 - protein, 18 aa, Hepatitis C virus
RHIDLLVGSATLCSALYV

SEQ ID NO: 1219 - protein, 18 aa, Hepatitis C virus
GSATLCSALYVGDLCGSV

SEQ ID NO: 1220 - protein, 18 aa, Hepatitis C virus
ALYVGDLCGSVFLVGQLF

SEQ ID NO: 1221 - protein, 18 aa, Hepatitis C virus
CGSVFLVGQLFTFSPRRH

SEQ ID NO: 1222 - protein, 18 aa, Hepatitis C virus
GQLFTFSPRRHWTTQDCN

SEQ ID NO: 1223 - protein, 18 aa, Hepatitis C virus
PRRHWTTQDCNCSIYPGH

SEQ ID NO: 1224 - protein, 18 aa, Hepatitis C virus
QDCNCSIYPGHITGHRMA

SEQ ID NO: 1225 - protein, 18 aa, Hepatitis C virus
YPGHITGHRMAWDMMMNW

SEQ ID NO: 1226 - protein, 18 aa, Hepatitis C virus
HRMAWDMMMNWSPTAALV

SEQ ID NO: 1227 - protein, 18 aa, Hepatitis C virus
MMNWSPTAALVVAQLLRI

SEQ ID NO: 1228 - protein, 18 aa, Hepatitis C virus
AALVVAQLLRIPQAIMDM

SEQ ID NO: 1229 - protein, 18 aa, Hepatitis C virus
LLRIPQAIMDMIAGAHWG

SEQ ID NO: 1230 - protein, 18 aa, Hepatitis C virus
IMDMIAGAHWGVLAGIAY

SEQ ID NO: 1231 - protein, 18 aa, Hepatitis C virus
AHWGVLAGIAYFSMVGNW

SEQ ID NO: 1232 - protein, 18 aa, Hepatitis C virus
GIAYFSMVGNWAKVLVVL

SEQ ID NO: 1233 - protein, 18 aa, Hepatitis C virus
VGNWAKVLVVLLLFAGVD

SEQ ID NO: 1234 - protein, 18 aa, Hepatitis C virus
LVVLLLFAGVDAETHVTG

SEQ ID NO: 1235 - protein, 18 aa, Hepatitis C virus
AGVDAETHVTGGSAGRTT

SEQ ID NO: 1236 - protein, 18 aa, Hepatitis C virus
HVTGGSAGRTTAGLVGLL

SEQ ID NO: 1237 - protein, 18 aa, Hepatitis C virus
GRTTAGLVGLLTPGAKQN

SEQ ID NO: 1238 - protein, 18 aa, Hepatitis C virus
VGLLTPGAKQNIQLINTN

SEQ ID NO: 1239 - protein, 18 aa, Hepatitis C virus
AKQNIQLINTNGSWHINS

SEQ ID NO: 1240 - protein, 18 aa, Hepatitis C virus
INTNGSWHINSTALNCNE

SEQ ID NO: 1241 - protein, 18 aa, Hepatitis C virus
HINSTALNCNESLNTGWL

SEQ ID NO: 1242 - protein, 18 aa, Hepatitis C virus
NCNESLNTGWLAGLFYQH

SEQ ID NO: 1243 - protein, 18 aa, Hepatitis C virus
TGWLAGLFYQHKFNSSGC

SEQ ID NO: 1244 - protein, 18 aa, Hepatitis C virus
FYQHKFNSSGCPERLASC

SEQ ID NO: 1245 - protein, 18 aa, Hepatitis C virus
SSGCPERLASCRRLTDFA

SEQ ID NO: 1246 - protein, 18 aa, Hepatitis C virus
LASCRRLTDFAQGWGPIS

SEQ ID NO: 1247 - protein, 18 aa, Hepatitis C virus
TDFAQGWGPISYANGSGL

SEQ ID NO: 1248 - protein, 18 aa, Hepatitis C virus
GPISYANGSGLDERPYCW

SEQ ID NO: 1249 - protein, 18 aa, Hepatitis C virus
GSGLDERPYCWHYPPRPC

SEQ ID NO: 1250 - protein, 18 aa, Hepatitis C virus
PYCWHYPPRPCGIVPAKS

SEQ ID NO: 1251 - protein, 18 aa, Hepatitis C virus
PRPCGIVPAKSVCGPVYC

SEQ ID NO: 1252 - protein, 18 aa, Hepatitis C virus
PAKSVCGPVYCFTPSPVV

SEQ ID NO: 1253 - protein, 18 aa, Hepatitis C virus
PVYCFTPSPVVVGTTDRS

SEQ ID NO: 1254 - protein, 18 aa, Hepatitis C virus
SPVVVGTTDRSGAPTYSW

SEQ ID NO: 1255 - protein, 18 aa, Hepatitis C virus
TDRSGAPTYSWGANDTDV

SEQ ID NO: 1256 - protein, 18 aa, Hepatitis C virus
TYSWGANDTDVFVLNNTR

SEQ ID NO: 1257 - protein, 18 aa, Hepatitis C virus
DTDVFVLNNTRPPLGNWF

SEQ ID NO: 1258 - protein, 18 aa, Hepatitis C virus
NNTRPPLGNWFGCTWMNS

SEQ ID NO: 1259 - protein, 18 aa, Hepatitis C virus
GNWFGCTWMNSTGFTKVC

SEQ ID NO: 1260 - protein, 18 aa, Hepatitis C virus
WMNSTGFTKVCGAPPCVI

SEQ ID NO: 1261 - protein, 18 aa, Hepatitis C virus
TKVCGAPPCVIGGVGNNT

SEQ ID NO: 1262 - protein, 18 aa, Hepatitis C virus
PCVIGGVGNNTLLCPTDC

SEQ ID NO: 1263 - protein, 18 aa, Hepatitis C virus
GNNTLLCPTDCFRKHPEA

SEQ ID NO: 1264 - protein, 18 aa, Hepatitis C virus
PTDCFRKHPEATYSRCGS

SEQ ID NO: 1265 - protein, 18 aa, Hepatitis C virus
HPEATYSRCGSGPWITPR

SEQ ID NO: 1266 - protein, 18 aa, Hepatitis C virus
RCGSGPWITPRCMVDYPY

SEQ ID NO: 1267 - protein, 18 aa, Hepatitis C virus
ITPRCMVDYPYRLWHYPC

SEQ ID NO: 1268 - protein, 18 aa, Hepatitis C virus
DYPYRLWHYPCTINYTIF

SEQ ID NO: 1269 - protein, 18 aa, Hepatitis C virus
HYPCTINYTIFKVRMYVG

SEQ ID NO: 1270 - protein, 18 aa, Hepatitis C virus
YTIFKVRMYVGGVEHRLE

SEQ ID NO: 1271 - protein, 18 aa, Hepatitis C virus
MYVGGVEHRLEAACNWTR

SEQ ID NO: 1272 - protein, 18 aa, Hepatitis C virus
HRLEAACNWTRGERCDLE

SEQ ID NO: 1273 - protein, 18 aa, Hepatitis C virus
NWTRGERCDLEDRDRSEL

SEQ ID NO: 1274 - protein, 18 aa, Hepatitis C virus
CDLEDRDRSELSPLLLST

SEQ ID NO: 1275 - protein, 18 aa, Hepatitis C virus
RSELSPLLLSTTQWQVLP

SEQ ID NO: 1276 - protein, 18 aa, Hepatitis C virus
LLSTTQWQVLPCSFTTLP

SEQ ID NO: 1277 - protein, 18 aa, Hepatitis C virus
QVLPCSFTTLPALSTGLI

SEQ ID NO: 1278 - protein, 18 aa, Hepatitis C virus
TTLPALSTGLIHLHQNIV

SEQ ID NO: 1279 - protein, 18 aa, Hepatitis C virus
TGLIHLHQNIVDVQYLYG

SEQ ID NO: 1280 - protein, 18 aa, Hepatitis C virus
QNIVDVQYLYGVGSSIAS

SEQ ID NO: 1281 - protein, 18 aa, Hepatitis C virus
YLYGVGSSIASWAIKWEY

SEQ ID NO: 1282 - protein, 18 aa, Hepatitis C virus
SIASWAIKWEYVVLLFLL

SEQ ID NO: 1283 - protein, 18 aa, Hepatitis C virus
KWEYVVLLFLLLADARVC

SEQ ID NO: 1284 - protein, 18 aa, Hepatitis C virus
LFLLLADARVCSCLWMML

SEQ ID NO: 1285 - protein, 18 aa, Hepatitis C virus
ARVCSCLWMMLLISQAEA

SEQ ID NO: 1286 - protein, 18 aa, Hepatitis C virus
WMMLLISQAEAALENLVI

SEQ ID NO: 1287 - protein, 18 aa, Hepatitis C virus
QAEAALENLVILNAASLA

SEQ ID NO: 1288 - protein, 18 aa, Hepatitis C virus
NLVILNAASLAGTHGLVS

SEQ ID NO: 1289 - protein, 18 aa, Hepatitis C virus
ASLAGTHGLVSFLVFFCF

SEQ ID NO: 1290 - protein, 18 aa, Hepatitis C virus
GLVSFLVFFCFAWYLKGR

SEQ ID NO: 1291 - protein, 18 aa, Hepatitis C virus
FFCFAWYLKGRWVPGAVY

SEQ ID NO: 1292 - protein, 18 aa, Hepatitis C virus
LKGRWVPGAVYAFYGMWP

SEQ ID NO: 1293 - protein, 18 aa, Hepatitis C virus
GAVYAFYGMWPLLLLLLA

SEQ ID NO: 1294 - protein, 18 aa, Hepatitis C virus
GMWPLLLLLLALPQRAYA

SEQ ID NO: 1295 - protein, 18 aa, Hepatitis C virus
LLLALPQRAYALDTEVAA

SEQ ID NO: 1296 - protein, 18 aa, Hepatitis C virus
RAYALDTEVAASCGGVVL

SEQ ID NO: 1297 - protein, 18 aa, Hepatitis C virus
EVAASCGGVVLVGLMALT

SEQ ID NO: 1298 - protein, 18 aa, Hepatitis C virus
GVVLVGLMALTLSPYYKR

SEQ ID NO: 1299 - protein, 18 aa, Hepatitis C virus
MALTLSPYYKRYISWCMW

SEQ ID NO: 1300 - protein, 18 aa, Hepatitis C virus
YYKRYISWCMWWLQYFLT

SEQ ID NO: 1301 - protein, 18 aa, Hepatitis C virus
WCMWWLQYFLTRVEAQLH

SEQ ID NO: 1302 - protein, 18 aa, Hepatitis C virus
YFLTRVEAQLHVWVPPLN

SEQ ID NO: 1303 - protein, 18 aa, Hepatitis C virus
AQLHVWVPPLNVRGGRDA

SEQ ID NO: 1304 - protein, 18 aa, Hepatitis C virus
PPLNVRGGRDAVILLMCV

SEQ ID NO: 1305 - protein, 18 aa, Hepatitis C virus
GRDAVILLMCVVHPTLVF

SEQ ID NO: 1306 - protein, 18 aa, Hepatitis C virus
LMCVVHPTLVFDITKLLL

SEQ ID NO: 1307 - protein, 18 aa, Hepatitis C virus
TLVFDITKLLLAIFGPLW

SEQ ID NO: 1308 - protein, 18 aa, Hepatitis C virus
KLLLAIFGPLWILQASLL

SEQ ID NO: 1309 - protein, 18 aa, Hepatitis C virus
GPLWILQASLLKVPYFVR

SEQ ID NO: 1310 - protein, 18 aa, Hepatitis C virus
ASLLKVPYFVRVQGLLRI

SEQ ID NO: 1311 - protein, 18 aa, Hepatitis C virus
YFVRVQGLLRICALARKI

SEQ ID NO: 1312 - protein, 18 aa, Hepatitis C virus
LLRICALARKIAGGHYVQ

SEQ ID NO: 1313 - protein, 18 aa, Hepatitis C virus
ARKIAGGHYVQMAIIKLG

SEQ ID NO: 1314 - protein, 18 aa, Hepatitis C virus
HYVQMAIIKLGALTGTYV

SEQ ID NO: 1315 - protein, 18 aa, Hepatitis C virus
IKLGALTGTYVYNHLTPL

SEQ ID NO: 1316 - protein, 18 aa, Hepatitis C virus
GTYVYNHLTPLRDWAHNG

SEQ ID NO: 1317 - protein, 18 aa, Hepatitis C virus
LTPLRDWAHNGLRDLAVA

SEQ ID NO: 1318 - protein, 18 aa, Hepatitis C virus
AHNGLRDLAVAVEPVVFS

SEQ ID NO: 1319 - protein, 18 aa, Hepatitis C virus
LAVAVEPVVFSRMETKLI

SEQ ID NO: 1320 - protein, 18 aa, Hepatitis C virus
VVFSRMETKLITWGADTA

SEQ ID NO: 1321 - protein, 18 aa, Hepatitis C virus
TKLITWGADTAACGDIIN

SEQ ID NO: 1322 - protein, 18 aa, Hepatitis C virus
ADTAACGDIINGLPVSAR

SEQ ID NO: 1323 - protein, 18 aa, Hepatitis C virus
DIINGLPVSARRGQEILL

SEQ ID NO: 1324 - protein, 18 aa, Hepatitis C virus
VSARRGQEILLGPADGMV

SEQ ID NO: 1325 - protein, 18 aa, Hepatitis C virus
EILLGPADGMVSKGWRLL

SEQ ID NO: 1326 - protein, 18 aa, Hepatitis C virus
DGMVSKGWRLLAPITAYA

SEQ ID NO: 1327 - protein, 18 aa, Hepatitis C virus
WRLLAPITAYAQQTRGLL

SEQ ID NO: 1328 - protein, 18 aa, Hepatitis C virus
TAYAQQTRGLLGCIITSL

SEQ ID NO: 1329 - protein, 18 aa, Hepatitis C virus
RGLLGCIITSLTGRDKNQ

SEQ ID NO: 1330 - protein, 18 aa, Hepatitis C virus
ITSLTGRDKNQVEGEVQI

SEQ ID NO: 1331 - protein, 18 aa, Hepatitis C virus
DKNQVEGEVQIVSTATQT

SEQ ID NO: 1332 - protein, 15 aa, Hepatitis C virus
EVQIVSTATQTFLAT

SEQ ID NO: 1333 - protein, 14 aa, Hepatitis C virus
VSTATQTFLATCIN

SEQ ID NO: 1334 - protein, 18 aa, Hepatitis C virus
ATQTFLATCINGVCWTVY

SEQ ID NO: 1335 - protein, 18 aa, Hepatitis C virus
TCINGVCWTVYHGAGTRT

SEQ ID NO: 1336 - protein, 18 aa, Hepatitis C virus
WTVYHGAGTRTIASPKGP

SEQ ID NO: 1337 - protein, 18 aa, Hepatitis C virus
GTRTIASPKGPVIQMYTN

SEQ ID NO: 1338 - protein, 18 aa, Hepatitis C virus
PKGPVIQMYTNVDQDLVG

SEQ ID NO: 1339 - protein, 18 aa, Hepatitis C virus
MYTNVDQDLVGWPAPQGS

SEQ ID NO: 1340 - protein, 18 aa, Hepatitis C virus
DLVGWPAPQGSRSLTPCT

SEQ ID NO: 1341 - protein, 18 aa, Hepatitis C virus
PQGSRSLTPCTCGSSDLY

SEQ ID NO: 1342 - protein, 18 aa, Hepatitis C virus
TPCTCGSSDLYLVTRHAD

SEQ ID NO: 1343 - protein, 18 aa, Hepatitis C virus
SDLYLVTRHADVIPVRRR

SEQ ID NO: 1344 - protein, 18 aa, Hepatitis C virus
RHADVIPVRRRGDSRGSL

SEQ ID NO: 1345 - protein, 18 aa, Hepatitis C virus
VRRRGDSRGSLLSPRPIS

SEQ ID NO: 1346 - protein, 18 aa, Hepatitis C virus
RGSLLSPRPISYLKGSSG

SEQ ID NO: 1347 - protein, 18 aa, Hepatitis C virus
RPISYLKGSSGGPLLCPA

SEQ ID NO: 1348 - protein, 18 aa, Hepatitis C virus
GSSGGPLLCPAGHAVGLF

SEQ ID NO: 1349 - protein, 18 aa, Hepatitis C virus
LCPAGHAVGLFRAAVCTR

SEQ ID NO: 1350 - protein, 18 aa, Hepatitis C virus
VGLFRAAVCTRGVAKAVD

SEQ ID NO: 1351 - protein, 18 aa, Hepatitis C virus
VCTRGVAKAVDFIPVENL

SEQ ID NO: 1352 - protein, 18 aa, Hepatitis C virus
KAVDFIPVENLETTMRSP

SEQ ID NO: 1353 - protein, 18 aa, Hepatitis C virus
VENLETTMRSPVFTDNSS

SEQ ID NO: 1354 - protein, 18 aa, Hepatitis C virus
MRSPVFTDNSSPPAVPQS

SEQ ID NO: 1355 - protein, 18 aa, Hepatitis C virus
DNSSPPAVPQSFQVAHLH

SEQ ID NO: 1356 - protein, 18 aa, Hepatitis C virus
VPQSFQVAHLHAPTGSGK

SEQ ID NO: 1357 - protein, 18 aa, Hepatitis C virus
AHLHAPTGSGKSTKVPAA

SEQ ID NO: 1358 - protein, 18 aa, Hepatitis C virus
GSGKSTKVPAAYAAQGYK

SEQ ID NO: 1359 - protein, 18 aa, Hepatitis C virus
VPAAYAAQGYKVLVLNPS

SEQ ID NO: 1360 - protein, 18 aa, Hepatitis C virus
QGYKVLVLNPSVAATLGF

SEQ ID NO: 1361 - protein, 18 aa, Hepatitis C virus
LNPSVAATLGFGAYMSKA

SEQ ID NO: 1362 - protein, 18 aa, Hepatitis C virus
TLGFGAYMSKAHGVDPNI

SEQ ID NO: 1363 - protein, 18 aa, Hepatitis C virus
MSKAHGVDPNIRTGVRTI

SEQ ID NO: 1364 - protein, 18 aa, Hepatitis C virus
DPNIRTGVRTITTGSPIT

SEQ ID NO: 1365 - protein, 18 aa, Hepatitis C virus
VRTITTGSPITYSTYGKF

SEQ ID NO: 1366 - protein, 18 aa, Hepatitis C virus
SPITYSTYGKFLADGGCS

SEQ ID NO: 1367 - protein, 18 aa, Hepatitis C virus
YGKFLADGGCSGGAYDII

SEQ ID NO: 1368 - protein, 18 aa, Hepatitis C virus
GGCSGGAYDIIICDECHS

SEQ ID NO: 1369 - protein, 18 aa, Hepatitis C virus
YDIIICDECHSTDATSIL

SEQ ID NO: 1370 - protein, 18 aa, Hepatitis C virus
ECHSTDATSILGIGTVLD

SEQ ID NO: 1371 - protein, 18 aa, Hepatitis C virus
TSILGIGTVLDQAETAGA

SEQ ID NO: 1372 - protein, 18 aa, Hepatitis C virus
TVLDQAETAGARLVVLAT

SEQ ID NO: 1373 - protein, 18 aa, Hepatitis C virus
TAGARLVVLATATPPGSV

SEQ ID NO: 1374 - protein, 18 aa, Hepatitis C virus
VLATATPPGSVTVSHPNI

SEQ ID NO: 1375 - protein, 18 aa, Hepatitis C virus
PGSVTVSHPNIEEVALST

SEQ ID NO: 1376 - protein, 18 aa, Hepatitis C virus
HPNIEEVALSTTGEIPFY

SEQ ID NO: 1377 - protein, 18 aa, Hepatitis C virus
ALSTTGEIPFYGKAIPLE

SEQ ID NO: 1378 - protein, 18 aa, Hepatitis C virus
IPFYGKAIPLEVIKGGRH

SEQ ID NO: 1379 - protein, 18 aa, Hepatitis C virus
IPLEVIKGGRHLIFCHSK

SEQ ID NO: 1380 - protein, 18 aa, Hepatitis C virus
GGRHLIFCHSKKKCDELA

SEQ ID NO: 1381 - protein, 18 aa, Hepatitis C virus
CHSKKKCDELAAKLVALG

SEQ ID NO: 1382 - protein, 18 aa, Hepatitis C virus
DELAAKLVALGINAVAYY

SEQ ID NO: 1383 - protein, 18 aa, Hepatitis C virus
VALGINAVAYYRGLDVSV

SEQ ID NO: 1384 - protein, 18 aa, Hepatitis C virus
VAYYRGLDVSVIPTSGDV

SEQ ID NO: 1385 - protein, 18 aa, Hepatitis C virus
DVSVIPTSGDVVVVSTDA

SEQ ID NO: 1386 - protein, 18 aa, Hepatitis C virus
SGDVVVVSTDALMTGFTG

SEQ ID NO: 1387 - protein, 18 aa, Hepatitis C virus
STDALMTGFTGDFDSVID

SEQ ID NO: 1388 - protein, 18 aa, Hepatitis C virus
GFTGDFDSVIDCNTCVTQ

SEQ ID NO: 1389 - protein, 18 aa, Hepatitis C virus
SVIDCNTCVTQTVDFSLD

SEQ ID NO: 1390 - protein, 18 aa, Hepatitis C virus
CVTQTVDFSLDPTFTIET

SEQ ID NO: 1391 - protein, 18 aa, Hepatitis C virus
FSLDPTFTIETTTLPQDA

SEQ ID NO: 1392 - protein, 18 aa, Hepatitis C virus
TIETTTLPQDAVSRTQRR

SEQ ID NO: 1393 - protein, 18 aa, Hepatitis C virus
PQDAVSRTQRRGRTGRGK

SEQ ID NO: 1394 - protein, 18 aa, Hepatitis C virus
TQRRGRTGRGKPGIYRFV

SEQ ID NO: 1395 - protein, 18 aa, Hepatitis C virus
GRGKPGIYRFVAPGERPS

SEQ ID NO: 1396 - protein, 18 aa, Hepatitis C virus
YRFVAPGERPSGMFDSSV

SEQ ID NO: 1397 - protein, 18 aa, Hepatitis C virus
ERPSGMFDSSVLCECYDA

SEQ ID NO: 1398 - protein, 18 aa, Hepatitis C virus
DSSVLCECYDAGCAWYEL

SEQ ID NO: 1399 - protein, 15 aa, Hepatitis C virus
CYDAGCAWYELTPAE

SEQ ID NO: 1400 - protein, 14 aa, Hepatitis C virus
GCAWYELTPAETTV

SEQ ID NO: 1401 - protein, 18 aa, Hepatitis C virus
WYELTPAETTVRLRAYMN

SEQ ID NO: 1402 - protein, 18 aa, Hepatitis C virus
ETTVRLRAYMNTPGLPVC

SEQ ID NO: 1403 - protein, 18 aa, Hepatitis C virus
AYMNTPGLPVCQDHLEFW

SEQ ID NO: 1404 - protein, 18 aa, Hepatitis C virus
LPVCQDHLEFWEGVFTGL

SEQ ID NO: 1405 - protein, 18 aa, Hepatitis C virus
LEFWEGVFTGLTHIDAHF

SEQ ID NO: 1406 - protein, 18 aa, Hepatitis C virus
FTGLTHIDAHFLSQTKQS

SEQ ID NO: 1407 - protein, 18 aa, Hepatitis C virus
DAHFLSQTKQSGENFPYL

SEQ ID NO: 1408 - protein, 18 aa, Hepatitis C virus
TKQSGENFPYLVAYQATV

SEQ ID NO: 1409 - protein, 18 aa, Hepatitis C virus
FPYLVAYQATVCARAQAP

SEQ ID NO: 1410 - protein, 18 aa, Hepatitis C virus
QATVCARAQAPPPSWDQM

SEQ ID NO: 1411 - protein, 18 aa, Hepatitis C virus
AQAPPPSWDQMWKCLIRL

SEQ ID NO: 1412 - protein, 18 aa, Hepatitis C virus
WDQMWKCLIRLKPTLHGP

SEQ ID NO: 1413 - protein, 18 aa, Hepatitis C virus
LIRLKPTLHGPTPLLYRL

SEQ ID NO: 1414 - protein, 18 aa, Hepatitis C virus
LHGPTPLLYRLGAVQNEV

SEQ ID NO: 1415 - protein, 18 aa, Hepatitis C virus
LYRLGAVQNEVTLTHPIT

SEQ ID NO: 1416 - protein, 18 aa, Hepatitis C virus
QNEVTLTHPITKYIMTCM

SEQ ID NO: 1417 - protein, 18 aa, Hepatitis C virus
HPITKYIMTCMSADLEVV

SEQ ID NO: 1418 - protein, 14 aa, Hepatitis C virus
MTCMSADLEVVTST

SEQ ID NO: 1419 - protein, 14 aa, Hepatitis C virus
TSTWVLVGGVLAAL

SEQ ID NO: 1420 - protein, 18 aa, Hepatitis C virus
WVLVGGVLAALAAYCLST

SEQ ID NO: 1421 - protein, 15 aa, Hepatitis C virus
LAALAAYCLSTGCVV

SEQ ID NO: 1422 - protein, 14 aa, Hepatitis C virus
AAYCLSTGCVVIVG

SEQ ID NO: 1423 - protein, 15 aa, Hepatitis C virus
CLSTGCVVIVGRIVL

SEQ ID NO: 1424 - protein, 14 aa, Hepatitis C virus
GCVVIVGRIVLSGK

SEQ ID NO: 1425 - protein, 18 aa, Hepatitis C virus
VIVGRIVLSGKPAIIPDR

SEQ ID NO: 1426 - protein, 18 aa, Hepatitis C virus
LSGKPAIIPDREVLYQEF

SEQ ID NO: 1427 - protein, 18 aa, Hepatitis C virus
IPDREVLYQEFDEMEECS

SEQ ID NO: 1428 - protein, 18 aa, Hepatitis C virus
YQEFDEMEECSQHLPYIE

SEQ ID NO: 1429 - protein, 18 aa, Hepatitis C virus
EECSQHLPYIEQGMMLAE

SEQ ID NO: 1430 - protein, 18 aa, Hepatitis C virus
PYIEQGMMLAEQFKQKAL

SEQ ID NO: 1431 - protein, 18 aa, Hepatitis C virus
MLAEQFKQKALGLLQTAS

SEQ ID NO: 1432 - protein, 18 aa, Hepatitis C virus
QKALGLLQTASRQAEVIT

SEQ ID NO: 1433 - protein, 18 aa, Hepatitis C virus
QTASRQAEVITPAVQTNW

SEQ ID NO: 1434 - protein, 18 aa, Hepatitis C virus
EVITPAVQTNWQKLEVFW

SEQ ID NO: 1435 - protein, 18 aa, Hepatitis C virus
QTNWQKLEVFWAKHMWNF

SEQ ID NO: 1436 - protein, 18 aa, Hepatitis C virus
EVFWAKHMWNFISGIQYL

SEQ ID NO: 1437 - protein, 18 aa, Hepatitis C virus
MWNFISGIQYLAGLSTLP

SEQ ID NO: 1438 - protein, 18 aa, Hepatitis C virus
IQYLAGLSTLPGNPAIAS

SEQ ID NO: 1439 - protein, 18 aa, Hepatitis C virus
STLPGNPAIASLMAFTAA

SEQ ID NO: 1440 - protein, 18 aa, Hepatitis C virus
AIASLMAFTAAVTSPLTT

SEQ ID NO: 1441 - protein, 18 aa, Hepatitis C virus
FTAAVTSPLTTGQTLLFN

SEQ ID NO: 1442 - protein, 18 aa, Hepatitis C virus
PLTTGQTLLFNILGGWVA

SEQ ID NO: 1443 - protein, 18 aa, Hepatitis C virus
LLFNILGGWVAAQLAAPG

SEQ ID NO: 1444 - protein, 18 aa, Hepatitis C virus
GWVAAQLAAPGAATAFVG

SEQ ID NO: 1445 - protein, 18 aa, Hepatitis C virus
AAPGAATAFVGAGLAGAA

SEQ ID NO: 1446 - protein, 18 aa, Hepatitis C virus
AFVGAGLAGAAIGSVGLG

SEQ ID NO: 1447 - protein, 18 aa, Hepatitis C virus
AGAAIGSVGLGKVLVDIL

SEQ ID NO: 1448 - protein, 18 aa, Hepatitis C virus
VGLGKVLVDILAGYGAGV

SEQ ID NO: 1449 - protein, 18 aa, Hepatitis C virus
VDILAGYGAGVAGALVAF

SEQ ID NO: 1450 - protein, 18 aa, Hepatitis C virus
GAGVAGALVAFKIMSGEV

SEQ ID NO: 1451 - protein, 18 aa, Hepatitis C virus
LVAFKIMSGEVPSTEDLV

SEQ ID NO: 1452 - protein, 18 aa, Hepatitis C virus
SGEVPSTEDLVNLLPAIL

SEQ ID NO: 1453 - protein, 18 aa, Hepatitis C virus
EDLVNLLPAILSPGALVV

SEQ ID NO: 1454 - protein, 18 aa, Hepatitis C virus
PAILSPGALVVGVVCAAI

SEQ ID NO: 1455 - protein, 18 aa, Hepatitis C virus
ALVVGVVCAAILRRHVGP

SEQ ID NO: 1456 - protein, 18 aa, Hepatitis C virus
CAAILRRHVGPGEGAVQW

SEQ ID NO: 1457 - protein, 18 aa, Hepatitis C virus
HVGPGEGAVQWMNRLIAF

SEQ ID NO: 1458 - protein, 18 aa, Hepatitis C virus
AVQWMNRLIAFASRGNHV

SEQ ID NO: 1459 - protein, 18 aa, Hepatitis C virus
LIAFASRGNHVSPTHYVP

SEQ ID NO: 1460 - protein, 18 aa, Hepatitis C virus
GNHVSPTHYVPESDAAAR

SEQ ID NO: 1461 - protein, 18 aa, Hepatitis C virus
HYVPESDAAARVTAILSS

SEQ ID NO: 1462 - protein, 18 aa, Hepatitis C virus
AAARVTAILSSLTVTQLL

SEQ ID NO: 1463 - protein, 18 aa, Hepatitis C virus
ILSSLTVTQLLRRLHQWI

SEQ ID NO: 1464 - protein, 18 aa, Hepatitis C virus
TQLLRRLHQWISSECTTP

SEQ ID NO: 1465 - protein, 18 aa, Hepatitis C virus
HQWISSECTTPCSGSWLR

SEQ ID NO: 1466 - protein, 18 aa, Hepatitis C virus
CTTPCSGSWLRDIWDWIC

SEQ ID NO: 1467 - protein, 18 aa, Hepatitis C virus
SWLRDIWDWICEVLSDFK

SEQ ID NO: 1468 - protein, 18 aa, Hepatitis C virus
DWICEVLSDFKTWLKAKL

SEQ ID NO: 1469 - protein, 18 aa, Hepatitis C virus
SDFKTWLKAKLMPQLPGI

SEQ ID NO: 1470 - protein, 18 aa, Hepatitis C virus
KAKLMPQLPGIPFVSCQR

SEQ ID NO: 1471 - protein, 18 aa, Hepatitis C virus
LPGIPFVSCQRGYRGVWR

SEQ ID NO: 1472 - protein, 18 aa, Hepatitis C virus
SCQRGYRGVWRGDGIMHT

SEQ ID NO: 1473 - protein, 18 aa, Hepatitis C virus
GVWRGDGIMHTRCHCGAE

SEQ ID NO: 1474 - protein, 18 aa, Hepatitis C virus
IMHTRCHCGAEITGHVKN

SEQ ID NO: 1475 - protein, 18 aa, Hepatitis C virus
CGAEITGHVKNGTMRIVG

SEQ ID NO: 1476 - protein, 18 aa, Hepatitis C virus
HVKNGTMRIVGPRTCRNM

SEQ ID NO: 1477 - protein, 18 aa, Hepatitis C virus
RIVGPRTCRNMWSGTFPI

SEQ ID NO: 1478 - protein, 18 aa, Hepatitis C virus
CRNMWSGTFPINAYTTGP

SEQ ID NO: 1479 - protein, 18 aa, Hepatitis C virus
TFPINAYTTGPCTPLPAP

SEQ ID NO: 1480 - protein, 18 aa, Hepatitis C virus
TTGPCTPLPAPNYKFALW

SEQ ID NO: 1481 - protein, 18 aa, Hepatitis C virus
LPAPNYKFALWRVSAEEY

SEQ ID NO: 1482 - protein, 18 aa, Hepatitis C virus
FALWRVSAEEYVEIRRVG

SEQ ID NO: 1483 - protein, 18 aa, Hepatitis C virus
AEEYVEIRRVGDFHYVSG

SEQ ID NO: 1484 - protein, 18 aa, Hepatitis C virus
RRVGDFHYVSGMTTDNLK

SEQ ID NO: 1485 - protein, 18 aa, Hepatitis C virus
YVSGMTTDNLKCPCQIPS

SEQ ID NO: 1486 - protein, 18 aa, Hepatitis C virus
DNLKCPCQIPSPEFFTEL

SEQ ID NO: 1487 - protein, 18 aa, Hepatitis C virus
QIPSPEFFTELDGVRLHR

SEQ ID NO: 1488 - protein, 18 aa, Hepatitis C virus
FTELDGVRLHRFAPPCKP

SEQ ID NO: 1489 - protein, 18 aa, Hepatitis C virus
RLHRFAPPCKPLLREEVS

SEQ ID NO: 1490 - protein, 18 aa, Hepatitis C virus
PCKPLLREEVSFRVGLHE

SEQ ID NO: 1491 - protein, 18 aa, Hepatitis C virus
EEVSFRVGLHEYPVGSQL

SEQ ID NO: 1492 - protein, 18 aa, Hepatitis C virus
GLHEYPVGSQLPCEPEPD

SEQ ID NO: 1493 - protein, 18 aa, Hepatitis C virus
GSQLPCEPEPDVAVLTSM

SEQ ID NO: 1494 - protein, 18 aa, Hepatitis C virus
PEPDVAVLTSMLTDPSHI

SEQ ID NO: 1495 - protein, 18 aa, Hepatitis C virus
LTSMLTDPSHITAEAAGR

SEQ ID NO: 1496 - protein, 18 aa, Hepatitis C virus
PSHITAEAAGRRLARGSP

SEQ ID NO: 1497 - protein, 18 aa, Hepatitis C virus
AAGRRLARGSPPSMASSS

SEQ ID NO: 1498 - protein, 18 aa, Hepatitis C virus
RGSPPSMASSSASQLSAP

SEQ ID NO: 1499 - protein, 18 aa, Hepatitis C virus
ASSSASQLSAPSLKATCT

SEQ ID NO: 1500 - protein, 18 aa, Hepatitis C virus
LSAPSLKATCTANHDSPD

SEQ ID NO: 1501 - protein, 18 aa, Hepatitis C virus
ATCTANHDSPDAELIEAN

SEQ ID NO: 1502 - protein, 18 aa, Hepatitis C virus
DSPDAELIEANLLWRQEM

SEQ ID NO: 1503 - protein, 18 aa, Hepatitis C virus
IEANLLWRQEMGGNITRV

SEQ ID NO: 1504 - protein, 18 aa, Hepatitis C virus
RQEMGGNITRVESENKVV

SEQ ID NO: 1505 - protein, 18 aa, Hepatitis C virus
ITRVESENKVVILDSFDP

SEQ ID NO: 1506 - protein, 18 aa, Hepatitis C virus
NKVVILDSFDPLVAEEDE

SEQ ID NO: 1507 - protein, 18 aa, Hepatitis C virus
SFDPLVAEEDEREVSVPA

SEQ ID NO: 1508 - protein, 18 aa, Hepatitis C virus
EEDEREVSVPAEILRKSR

SEQ ID NO: 1509 - protein, 18 aa, Hepatitis C virus
SVPAEILRKSRRFARALP

SEQ ID NO: 1510 - protein, 18 aa, Hepatitis C virus
RKSRRFARALPVWARPDY

SEQ ID NO: 1511 - protein, 18 aa, Hepatitis C virus
RALPVWARPDYNPPLVET

SEQ ID NO: 1512 - protein, 18 aa, Hepatitis C virus
RPDYNPPLVETWKKPDYE

SEQ ID NO: 1513 - protein, 18 aa, Hepatitis C virus
LVETWKKPDYEPPVVHGC

SEQ ID NO: 1514 - protein, 18 aa, Hepatitis C virus
PDYEPPVVHGCPLPPPRS

SEQ ID NO: 1515 - protein, 18 aa, Hepatitis C virus
VHGCPLPPPRSPPVPPPR

SEQ ID NO: 1516 - protein, 18 aa, Hepatitis C virus
PPRSPPVPPPRKKRTVVL

SEQ ID NO: 1517 - protein, 18 aa, Hepatitis C virus
PPPRKKRTVVLTESTLST

SEQ ID NO: 1518 - protein, 18 aa, Hepatitis C virus
TVVLTESTLSTALAELAT

SEQ ID NO: 1519 - protein, 18 aa, Hepatitis C virus
TLSTALAELATKSFGSSS

SEQ ID NO: 1520 - protein, 18 aa, Hepatitis C virus
ELATKSFGSSSTSGITGD

SEQ ID NO: 1521 - protein, 18 aa, Hepatitis C virus
GSSSTSGITGDNTTTSSE

SEQ ID NO: 1522 - protein, 18 aa, Hepatitis C virus
ITGDNTTTSSEPAPSGCP

SEQ ID NO: 1523 - protein, 18 aa, Hepatitis C virus
TSSEPAPSGCPPDSDVES

SEQ ID NO: 1524 - protein, 15 aa, Hepatitis C virus
SGCPPDSDVESYSSM

SEQ ID NO: 1525 - protein, 14 aa, Hepatitis C virus
PDSDVESYSSMPPL

SEQ ID NO: 1526 - protein, 18 aa, Hepatitis C virus
DVESYSSMPPLEGEPGDP

SEQ ID NO: 1527 - protein, 18 aa, Hepatitis C virus
MPPLEGEPGDPDLSDGSW

SEQ ID NO: 1528 - protein, 18 aa, Hepatitis C virus
PGDPDLSDGSWSTVSSGA

SEQ ID NO: 1529 - protein, 15 aa, Hepatitis C virus
DGSWSTVSSGADTED

SEQ ID NO: 1530 - protein, 13 aa, Hepatitis C virus
TVSSGADTEDVVC

SEQ ID NO: 1531 - protein, 15 aa, Hepatitis C virus
SSGADTEDVVCCSMS

SEQ ID NO: 1532 - protein, 14 aa, Hepatitis C virus
DTEDVVCCSMSYSW

SEQ ID NO: 1533 - protein, 15 aa, Hepatitis C virus
DVVCCSMSYSWTGAL

SEQ ID NO: 1534 - protein, 14 aa, Hepatitis C virus
CSMSYSWTGALVTP

SEQ ID NO: 1535 - protein, 18 aa, Hepatitis C virus
SYSWTGALVTPCAAEEQK

SEQ ID NO: 1536 - protein, 18 aa, Hepatitis C virus
LVTPCAAEEQKLPINALS

SEQ ID NO: 1537 - protein, 18 aa, Hepatitis C virus
EEQKLPINALSNSLLRHH

SEQ ID NO: 1538 - protein, 18 aa, Hepatitis C virus
NALSNSLLRHHNLVYSTT

SEQ ID NO: 1539 - protein, 18 aa, Hepatitis C virus
LRHHNLVYSTTSRSACQR

SEQ ID NO: 1540 - protein, 18 aa, Hepatitis C virus
YSTTSRSACQRQKKVTFD

SEQ ID NO: 1541 - protein, 18 aa, Hepatitis C virus
ACQRQKKVTFDRLQVLDS

SEQ ID NO: 1542 - protein, 18 aa, Hepatitis C virus
VTFDRLQVLDSHYQDVLK

SEQ ID NO: 1543 - protein, 18 aa, Hepatitis C virus
VLDSHYQDVLKEVKAAAS

SEQ ID NO: 1544 - protein, 18 aa, Hepatitis C virus
DVLKEVKAAASKVKANLL

SEQ ID NO: 1545 - protein, 18 aa, Hepatitis C virus
AAASKVKANLLSVEEACS

SEQ ID NO: 1546 - protein, 18 aa, Hepatitis C virus
ANLLSVEEACSLTPPHSA

SEQ ID NO: 1547 - protein, 18 aa, Hepatitis C virus
EACSLTPPHSAKSKFGYG

SEQ ID NO: 1548 - protein, 18 aa, Hepatitis C virus
PHSAKSKFGYGAKDVRCH

SEQ ID NO: 1549 - protein, 18 aa, Hepatitis C virus
FGYGAKDVRCHARKAVAH

SEQ ID NO: 1550 - protein, 18 aa, Hepatitis C virus
VRCHARKAVAHINSVWKD

SEQ ID NO: 1551 - protein, 18 aa, Hepatitis C virus
AVAHINSVWKDLLEDSVT

SEQ ID NO: 1552 - protein, 18 aa, Hepatitis C virus
VWKDLLEDSVTPIDTTIM

SEQ ID NO: 1553 - protein, 18 aa, Hepatitis C virus
DSVTPIDTTIMAKNEVFC

SEQ ID NO: 1554 - protein, 18 aa, Hepatitis C virus
TTIMAKNEVFCVQPEKGG

SEQ ID NO: 1555 - protein, 18 aa, Hepatitis C virus
EVFCVQPEKGGRKPARLI

SEQ ID NO: 1556 - protein, 18 aa, Hepatitis C virus
EKGGRKPARLIVFPDLGV

SEQ ID NO: 1557 - protein, 18 aa, Hepatitis C virus
ARLIVFPDLGVRVCEKMA

SEQ ID NO: 1558 - protein, 18 aa, Hepatitis C virus
DLGVRVCEKMALYDVVSK

SEQ ID NO: 1559 - protein, 18 aa, Hepatitis C virus
EKMALYDVVSKLPLAVMG

SEQ ID NO: 1560 - protein, 18 aa, Hepatitis C virus
VVSKLPLAVMGSSYGFQY

SEQ ID NO: 1561 - protein, 18 aa, Hepatitis C virus
AVMGSSYGFQYSPGQRVE

SEQ ID NO: 1562 - protein, 18 aa, Hepatitis C virus
GFQYSPGQRVEFLVQAWK

SEQ ID NO: 1563 - protein, 18 aa, Hepatitis C virus
QRVEFLVQAWKSKKTPMG

SEQ ID NO: 1564 - protein, 18 aa, Hepatitis C virus
QAWKSKKTPMGFSYDTRC

SEQ ID NO: 1565 - protein, 18 aa, Hepatitis C virus
TPMGFSYDTRCFDSTVTE

SEQ ID NO: 1566 - protein, 18 aa, Hepatitis C virus
DTRCFDSTVTESDIRTEE

SEQ ID NO: 1567 - protein, 18 aa, Hepatitis C virus
TVTESDIRTEEAIYQCCD

SEQ ID NO: 1568 - protein, 18 aa, Hepatitis C virus
RTEEAIYQCCDLDPQARV

SEQ ID NO: 1569 - protein, 18 aa, Hepatitis C virus
QCCDLDPQARVAIKSLTE

SEQ ID NO: 1570 - protein, 18 aa, Hepatitis C virus
QARVAIKSLTERLYVGGP

SEQ ID NO: 1571 - protein, 18 aa, Hepatitis C virus
SLTERLYVGGPLTNSRGE

SEQ ID NO: 1572 - protein, 18 aa, Hepatitis C virus
VGGPLTNSRGENCGYRRC

SEQ ID NO: 1573 - protein, 18 aa, Hepatitis C virus
SRGENCGYRRCRASGVLT

SEQ ID NO: 1574 - protein, 18 aa, Hepatitis C virus
YRRCRASGVLTTSCGNTL

SEQ ID NO: 1575 - protein, 18 aa, Hepatitis C virus
GVLTTSCGNTLTCYIKAR

SEQ ID NO: 1576 - protein, 18 aa, Hepatitis C virus
GNTLTCYIKARAACRAAG

SEQ ID NO: 1577 - protein, 18 aa, Hepatitis C virus
IKARAACRAAGLQDCTML

SEQ ID NO: 1578 - protein, 18 aa, Hepatitis C virus
RAAGLQDCTMLVCGDDLV

SEQ ID NO: 1579 - protein, 18 aa, Hepatitis C virus
CTMLVCGDDLVVICESAG

SEQ ID NO: 1580 - protein, 18 aa, Hepatitis C virus
DDLVVICESAGVQEDAAS

SEQ ID NO: 1581 - protein, 18 aa, Hepatitis C virus
ESAGVQEDAASLRAFTEA

SEQ ID NO: 1582 - protein, 18 aa, Hepatitis C virus
DAASLRAFTEAMTRYSAP

SEQ ID NO: 1583 - protein, 18 aa, Hepatitis C virus
FTEAMTRYSAPPGDPPQP

SEQ ID NO: 1584 - protein, 18 aa, Hepatitis C virus
YSAPPGDPPQPEYDLELI

SEQ ID NO: 1585 - protein, 18 aa, Hepatitis C virus
PPQPEYDLELITSCSSNV

SEQ ID NO: 1586 - protein, 18 aa, Hepatitis C virus
LELITSCSSNVSVAHDGA

SEQ ID NO: 1587 - protein, 18 aa, Hepatitis C virus
SSNVSVAHDGAGKRVYYL

SEQ ID NO: 1588 - protein, 18 aa, Hepatitis C virus
HDGAGKRVYYLTRDPTTP

SEQ ID NO: 1589 - protein, 18 aa, Hepatitis C virus
VYYLTRDPTTPLARAAWE

SEQ ID NO: 1590 - protein, 18 aa, Hepatitis C virus
PTTPLARAAWETARHTPV

SEQ ID NO: 1591 - protein, 18 aa, Hepatitis C virus
AAWETARHTPVNSWLGNI

SEQ ID NO: 1592 - protein, 18 aa, Hepatitis C virus
HTPVNSWLGNIIMFAPTL

SEQ ID NO: 1593 - protein, 18 aa, Hepatitis C virus
LGNIIMFAPTLWARMILM

SEQ ID NO: 1594 - protein, 18 aa, Hepatitis C virus
APTLWARMILMTHFFSVL

SEQ ID NO: 1595 - protein, 18 aa, Hepatitis C virus
MILMTHFFSVLIARDQLE

SEQ ID NO: 1596 - protein, 18 aa, Hepatitis C virus
FSVLIARDQLEQALNCEI

SEQ ID NO: 1597 - protein, 18 aa, Hepatitis C virus
DQLEQALNCEIYGACYSI

SEQ ID NO: 1598 - protein, 15 aa, Hepatitis C virus
NCEIYGACYSIEPLD

SEQ ID NO: 1599 - protein, 14 aa, Hepatitis C virus
YGACYSIEPLDLPP

SEQ ID NO: 1600 - protein, 18 aa, Hepatitis C virus
CYSIEPLDLPPIIQRLHG

SEQ ID NO: 1601 - protein, 18 aa, Hepatitis C virus
DLPPIIQRLHGLSAFSLH

SEQ ID NO: 1602 - protein, 18 aa, Hepatitis C virus
RLHGLSAFSLHSYSPGEI

SEQ ID NO: 1603 - protein, 18 aa, Hepatitis C virus
FSLHSYSPGEINRVAACL

SEQ ID NO: 1604 - protein, 18 aa, Hepatitis C virus
PGEINRVAACLRKLGVPP

SEQ ID NO: 1605 - protein, 18 aa, Hepatitis C virus
AACLRKLGVPPLRAWRHR

SEQ ID NO: 1606 - protein, 18 aa, Hepatitis C virus
GVPPLRAWRHRARSVRAR

SEQ ID NO: 1607 - protein, 18 aa, Hepatitis C virus
WRHRARSVRARLLSRGGR

SEQ ID NO: 1608 - protein, 18 aa, Hepatitis C virus
VRARLLSRGGRAAICGKY

SEQ ID NO: 1609 - protein, 18 aa, Hepatitis C virus
RGGRAAICGKYLFNWAVR

SEQ ID NO: 1610 - protein, 18 aa, Hepatitis C virus
CGKYLFNWAVRTKLKLTP

SEQ ID NO: 1611 - protein, 18 aa, Hepatitis C virus
WAVRTKLKLTPIAAAGRL

SEQ ID NO: 1612 - protein, 18 aa, Hepatitis C virus
KLTPIAAAGRLDLSGWFT

SEQ ID NO: 1613 - protein, 18 aa, Hepatitis C virus
AGRLDLSGWFTAGYSGGD

SEQ ID NO: 1614 - protein, 18 aa, Hepatitis C virus
GWFTAGYSGGDIYHSVSH

SEQ ID NO: 1615 - protein, 18 aa, Hepatitis C virus
SGGDIYHSVSHARPRWFW

SEQ ID NO: 1616 - protein, 18 aa, Hepatitis C virus
SVSHARPRWFWFCLLLLA

SEQ ID NO: 1617 - protein, 15 aa, Hepatitis C virus
RWFWFCLLLLAAGVG

SEQ ID NO: 1618 - protein, 14 aa, Hepatitis C virus
FCLLLLAAGVGIYL

SEQ ID NO: 1619 - protein, 15 aa, Hepatitis C virus
LLLAAGVGIYLLPNR

SEQ ID NO: 1620 - protein, 15 aa, Hepatitis B virus
MGGWSSKPRKGMGTN

SEQ ID NO: 1621 - protein, 15 aa, Hepatitis B virus
SSKPRKGMGTNLSVP

SEQ ID NO: 1622 - protein, 15 aa, Hepatitis B virus
RKGMGTNLSVPNPLG

SEQ ID NO: 1623 - protein, 15 aa, Hepatitis B virus
GTNLSVPNPLGFFPD

SEQ ID NO: 1624 - protein, 15 aa, Hepatitis B virus
SVPNPLGFFPDHQLD

SEQ ID NO: 1625 - protein, 15 aa, Hepatitis B virus
PLGFFPDHQLDPAFG

SEQ ID NO: 1626 - protein, 15 aa, Hepatitis B virus
FPDHQLDPAFGANSN

SEQ ID NO: 1627 - protein, 15 aa, Hepatitis B virus
QLDPAFGANSNNPDW

SEQ ID NO: 1628 - protein, 15 aa, Hepatitis B virus
AFGANSNNPDWDFNP

SEQ ID NO: 1629 - protein, 15 aa, Hepatitis B virus
NSNNPDWDFNPIKDH

SEQ ID NO: 1630 - protein, 15 aa, Hepatitis B virus
PDWDFNPIKDHWPAA

SEQ ID NO: 1631 - protein, 15 aa, Hepatitis B virus
FNPIKDHWPAANQVG

SEQ ID NO: 1632 - protein, 15 aa, Hepatitis B virus
KDHWPAANQVGVGAF

SEQ ID NO: 1633 - protein, 15 aa, Hepatitis B virus
PAANQVGVGAFGPGL

SEQ ID NO: 1634 - protein, 15 aa, Hepatitis B virus
QVGVGAFGPGLTPPH

SEQ ID NO: 1635 - protein, 15 aa, Hepatitis B virus
GAFGPGLTPPHGGIL

SEQ ID NO: 1636 - protein, 15 aa, Hepatitis B virus
PGLTPPHGGILGWSP

SEQ ID NO: 1637 - protein, 15 aa, Hepatitis B virus
PPHGGILGWSPQAQG

SEQ ID NO: 1638 - protein, 15 aa, Hepatitis B virus
GILGWSPQAQGILTT

SEQ ID NO: 1639 - protein, 15 aa, Hepatitis B virus
WSPQAQGILTTVSTI

SEQ ID NO: 1640 - protein, 15 aa, Hepatitis B virus
AQGILTTVSTIPPPA

SEQ ID NO: 1641 - protein, 15 aa, Hepatitis B virus
LTTVSTIPPPASTNR

SEQ ID NO: 1642 - protein, 15 aa, Hepatitis B virus
STIPPPASTNRQSGR

SEQ ID NO: 1643 - protein, 15 aa, Hepatitis B virus
PPASTNRQSGRQPTP

SEQ ID NO: 1644 - protein, 15 aa, Hepatitis B virus
TNRQSGRQPTPISPP

SEQ ID NO: 1645 - protein, 15 aa, Hepatitis B virus
SGRQPTPISPPLRDS

SEQ ID NO: 1646 - protein, 15 aa, Hepatitis B virus
PTPISPPLRDSHPQA

SEQ ID NO: 1647 - protein, 15 aa, Hepatitis B virus
SPPLRDSHPQAMQWN

SEQ ID NO: 1648 - protein, 15 aa, Hepatitis B virus
RDSHPQAMQWNSTAF

SEQ ID NO: 1649 - protein, 15 aa, Hepatitis B virus
PQAMQWNSTAFHQAL

SEQ ID NO: 1650 - protein, 15 aa, Hepatitis B virus
QWNSTAFHQALQDPR

SEQ ID NO: 1651 - protein, 15 aa, Hepatitis B virus
TAFHQALQDPRVRGL

SEQ ID NO: 1652 - protein, 15 aa, Hepatitis B virus
QALQDPRVRGLYLPA

SEQ ID NO: 1653 - protein, 15 aa, Hepatitis B virus
DPRVRGLYLPAGGSS

SEQ ID NO: 1654 - protein, 15 aa, Hepatitis B virus
RGLYLPAGGSSSGTV

SEQ ID NO: 1655 - protein, 15 aa, Hepatitis B virus
LPAGGSSSGTVNPAP

SEQ ID NO: 1656 - protein, 15 aa, Hepatitis B virus
GSSSGTVNPAPNIAS

SEQ ID NO: 1657 - protein, 15 aa, Hepatitis B virus
GTVNPAPNIASHISS

SEQ ID NO: 1658 - protein, 15 aa, Hepatitis B virus
PAPNIASHISSISAR

SEQ ID NO: 1659 - protein, 15 aa, Hepatitis B virus
IASHISSISARTGDP

SEQ ID NO: 1660 - protein, 15 aa, Hepatitis B virus
ISSISARTGDPVTNM

SEQ ID NO: 1661 - protein, 15 aa, Hepatitis B virus
SARTGDPVTNMENIT

SEQ ID NO: 1662 - protein, 15 aa, Hepatitis B virus
GDPVTNMENITSGFL

SEQ ID NO: 1663 - protein, 15 aa, Hepatitis B virus
TNMENITSGFLGPLL

SEQ ID NO: 1664 - protein, 15 aa, Hepatitis B virus
NITSGFLGPLLVLQA

SEQ ID NO: 1665 - protein, 15 aa, Hepatitis B virus
GFLGPLLVLQAGFFL

SEQ ID NO: 1666 - protein, 15 aa, Hepatitis B virus
PLLVLQAGFFLLTRI

SEQ ID NO: 1667 - protein, 15 aa, Hepatitis B virus
LQAGFFLLTRILTIP

SEQ ID NO: 1668 - protein, 15 aa, Hepatitis B virus
FFLLTRILTIPQSLD

SEQ ID NO: 1669 - protein, 15 aa, Hepatitis B virus
TRILTIPQSLDSWWT

SEQ ID NO: 1670 - protein, 15 aa, Hepatitis B virus
TIPQSLDSWWTSLNF

SEQ ID NO: 1671 - protein, 15 aa, Hepatitis B virus
SLDSWWTSLNFLGGS

SEQ ID NO: 1672 - protein, 15 aa, Hepatitis B virus
WWTSLNFLGGSPVCL

SEQ ID NO: 1673 - protein, 15 aa, Hepatitis B virus
LNFLGGSPVCLGQNS

SEQ ID NO: 1674 - protein, 15 aa, Hepatitis B virus
GGSPVCLGQNSQSPT

SEQ ID NO: 1675 - protein, 15 aa, Hepatitis B virus
VCLGQNSQSPTSNHS

SEQ ID NO: 1676 - protein, 15 aa, Hepatitis B virus
QNSQSPTSNHSPTSC

SEQ ID NO: 1677 - protein, 15 aa, Hepatitis B virus
SPTSNHSPTSCPPIC

SEQ ID NO: 1678 - protein, 15 aa, Hepatitis B virus
NHSPTSCPPICPGYR

SEQ ID NO: 1679 - protein, 15 aa, Hepatitis B virus
TSCPPICPGYRWMCL

SEQ ID NO: 1680 - protein, 15 aa, Hepatitis B virus
PICPGYRWMCLRRFI

SEQ ID NO: 1681 - protein, 15 aa, Hepatitis B virus
GYRWMCLRRFIIFLF

SEQ ID NO: 1682 - protein, 15 aa, Hepatitis B virus
MCLRRFIIFLFILLL

SEQ ID NO: 1683 - protein, 15 aa, Hepatitis B virus
RFIIFLFILLLCLIF

SEQ ID NO: 1684 - protein, 15 aa, Hepatitis B virus
FLFILLLCLIFLLVL

SEQ ID NO: 1685 - protein, 15 aa, Hepatitis B virus
LLLCLIFLLVLLDYQ

SEQ ID NO: 1686 - protein, 15 aa, Hepatitis B virus
LIFLLVLLDYQGMLP

SEQ ID NO: 1687 - protein, 15 aa, Hepatitis B virus
LVLLDYQGMLPVCPL

SEQ ID NO: 1688 - protein, 15 aa, Hepatitis B virus
DYQGMLPVCPLIPGS

SEQ ID NO: 1689 - protein, 15 aa, Hepatitis B virus
MLPVCPLIPGSTTTS

SEQ ID NO: 1690 - protein, 15 aa, Hepatitis B virus
CPLIPGSTTTSTGPC

SEQ ID NO: 1691 - protein, 15 aa, Hepatitis B virus
PGSTTTSTGPCKTCT

SEQ ID NO: 1692 - protein, 15 aa, Hepatitis B virus
TTSTGPCKTCTTPAQ

SEQ ID NO: 1693 - protein, 15 aa, Hepatitis B virus
GPCKTCTTPAQGNSM

SEQ ID NO: 1694 - protein, 15 aa, Hepatitis B virus
TCTTPAQGNSMFPSC

SEQ ID NO: 1695 - protein, 15 aa, Hepatitis B virus
PAQGNSMFPSCCCTK

SEQ ID NO: 1696 - protein, 15 aa, Hepatitis B virus
NSMFPSCCCTKPTDG

SEQ ID NO: 1697 - protein, 15 aa, Hepatitis B virus
PSCCCTKPTDGNCTC

SEQ ID NO: 1698 - protein, 15 aa, Hepatitis B virus
CTKPTDGNCTCIPIP

SEQ ID NO: 1699 - protein, 15 aa, Hepatitis B virus
TDGNCTCIPIPSSWA

SEQ ID NO: 1700 - protein, 15 aa, Hepatitis B virus
CTCIPIPSSWAFAKY

SEQ ID NO: 1701 - protein, 15 aa, Hepatitis B virus
PIPSSWAFAKYLWEW

SEQ ID NO: 1702 - protein, 15 aa, Hepatitis B virus
SWAFAKYLWEWASVR

SEQ ID NO: 1703 - protein, 15 aa, Hepatitis B virus
AKYLWEWASVRFSWL

SEQ ID NO: 1704 - protein, 15 aa, Hepatitis B virus
WEWASVRFSWLSLLV

SEQ ID NO: 1705 - protein, 15 aa, Hepatitis B virus
SVRFSWLSLLVPFVQ

SEQ ID NO: 1706 - protein, 15 aa, Hepatitis B virus
SWLSLLVPFVQWFVG

SEQ ID NO: 1707 - protein, 15 aa, Hepatitis B virus
LLVPFVQWFVGLSPT

SEQ ID NO: 1708 - protein, 15 aa, Hepatitis B virus
FVQWFVGLSPTVWLS

SEQ ID NO: 1709 - protein, 15 aa, Hepatitis B virus
FVGLSPTVWLSAIWM

SEQ ID NO: 1710 - protein, 15 aa, Hepatitis B virus
SPTVWLSAIWMMWYW

SEQ ID NO: 1711 - protein, 15 aa, Hepatitis B virus
WLSAIWMMWYWGPSL

SEQ ID NO: 1712 - protein, 15 aa, Hepatitis B virus
IWMMWYWGPSLYSIV

SEQ ID NO: 1713 - protein, 15 aa, Hepatitis B virus
WYWGPSLYSIVSPFI

SEQ ID NO: 1714 - protein, 15 aa, Hepatitis B virus
PSLYSIVSPFIPLLP

SEQ ID NO: 1715 - protein, 15 aa, Hepatitis B virus
SIVSPFIPLLPIFFC

SEQ ID NO: 1716 - protein, 15 aa, Hepatitis B virus
PFIPLLPIFFCLWVY

SEQ ID NO: 1717 - protein, 15 aa, Hepatitis B virus
FIPLLPIFFCLWVYI

SEQ ID NO: 1718 - protein, 15 aa, Hepatitis B virus
MAARLYCQLDPSRDV

SEQ ID NO: 1719 - protein, 15 aa, Hepatitis B virus
LYCQLDPSRDVLCLR

SEQ ID NO: 1720 - protein, 15 aa, Hepatitis B virus
LDPSRDVLCLRPVGA

SEQ ID NO: 1721 - protein, 15 aa, Hepatitis B virus
RDVLCLRPVGAESRG

SEQ ID NO: 1722 - protein, 15 aa, Hepatitis B virus
CLRPVGAESRGRPLS

SEQ ID NO: 1723 - protein, 15 aa, Hepatitis B virus
VGAESRGRPLSGPLG

SEQ ID NO: 1724 - protein, 15 aa, Hepatitis B virus
SRGRPLSGPLGTLSS

SEQ ID NO: 1725 - protein, 15 aa, Hepatitis B virus
PLSGPLGTLSSPSPS

SEQ ID NO: 1726 - protein, 15 aa, Hepatitis B virus
PLGTLSSPSPSAVPA

SEQ ID NO: 1727 - protein, 15 aa, Hepatitis B virus
LSSPSPSAVPADHGA

SEQ ID NO: 1728 - protein, 15 aa, Hepatitis B virus
SPSAVPADHGAHLSL

SEQ ID NO: 1729 - protein, 15 aa, Hepatitis B virus
VPADHGAHLSLRGLP

SEQ ID NO: 1730 - protein, 15 aa, Hepatitis B virus
HGAHLSLRGLPVCAF

SEQ ID NO: 1731 - protein, 15 aa, Hepatitis B virus
LSLRGLPVCAFSSAG

SEQ ID NO: 1732 - protein, 15 aa, Hepatitis B virus
GLPVCAFSSAGPCAL

SEQ ID NO: 1733 - protein, 15 aa, Hepatitis B virus
CAFSSAGPCALRFTS

SEQ ID NO: 1734 - protein, 15 aa, Hepatitis B virus
SAGPCALRFTSARCM

SEQ ID NO: 1735 - protein, 15 aa, Hepatitis B virus
CALRFTSARCMETTV

SEQ ID NO: 1736 - protein, 15 aa, Hepatitis B virus
FTSARCMETTVNAHQ

SEQ ID NO: 1737 - protein, 15 aa, Hepatitis B virus
RCMETTVNAHQILPK

SEQ ID NO: 1738 - protein, 15 aa, Hepatitis B virus
TTVNAHQILPKVLHK

SEQ ID NO: 1739 - protein, 15 aa, Hepatitis B virus
AHQILPKVLHKRTLG

SEQ ID NO: 1740 - protein, 15 aa, Hepatitis B virus
LPKVLHKRTLGLPAM

SEQ ID NO: 1741 - protein, 15 aa, Hepatitis B virus
LHKRTLGLPAMSTTD

SEQ ID NO: 1742 - protein, 15 aa, Hepatitis B virus
TLGLPAMSTTDLEAY

SEQ ID NO: 1743 - protein, 15 aa, Hepatitis B virus
PAMSTTDLEAYFKDC

SEQ ID NO: 1744 - protein, 15 aa, Hepatitis B virus
TTDLEAYFKDCVFKD

SEQ ID NO: 1745 - protein, 15 aa, Hepatitis B virus
EAYFKDCVFKDWEEL

SEQ ID NO: 1746 - protein, 15 aa, Hepatitis B virus
KDCVFKDWEELGEEI

SEQ ID NO: 1747 - protein, 15 aa, Hepatitis B virus
FKDWEELGEEIRLMI

SEQ ID NO: 1748 - protein, 15 aa, Hepatitis B virus
EELGEEIRLMIFVLG

SEQ ID NO: 1749 - protein, 15 aa, Hepatitis B virus
EEIRLMIFVLGGCRH

SEQ ID NO: 1750 - protein, 15 aa, Hepatitis B virus
LMIFVLGGCRHKLVC

SEQ ID NO: 1751 - protein, 15 aa, Hepatitis B virus
VLGGCRHKLVCAPAP

SEQ ID NO: 1752 - protein, 15 aa, Hepatitis B virus
CRHKLVCAPAPCNFF

SEQ ID NO: 1753 - protein, 15 aa, Hepatitis B virus
KLVCAPAPCNFFTSA

SEQ ID NO: 1754 - protein, 15 aa, Hepatitis B virus
MPLSYQHFRKLLLLD

SEQ ID NO: 1755 - protein, 15 aa, Hepatitis B virus
YQHFRKLLLLDDGTE

SEQ ID NO: 1756 - protein, 15 aa, Hepatitis B virus
RKLLLLDDGTEAGPL

SEQ ID NO: 1757 - protein, 15 aa, Hepatitis B virus
LLDDGTEAGPLEEEL

SEQ ID NO: 1758 - protein, 15 aa, Hepatitis B virus
GTEAGPLEEELPRLA

SEQ ID NO: 1759 - protein, 15 aa, Hepatitis B virus
GPLEEELPRLADADL

SEQ ID NO: 1760 - protein, 15 aa, Hepatitis B virus
EELPRLADADLNRRV

SEQ ID NO: 1761 - protein, 15 aa, Hepatitis B virus
RLADADLNRRVAEDL

SEQ ID NO: 1762 - protein, 15 aa, Hepatitis B virus
ADLNRRVAEDLNLGN

SEQ ID NO: 1763 - protein, 15 aa, Hepatitis B virus
RRVAEDLNLGNLNVS

SEQ ID NO: 1764 - protein, 15 aa, Hepatitis B virus
EDLNLGNLNVSIPWT

SEQ ID NO: 1765 - protein, 15 aa, Hepatitis B virus
LGNLNVSIPWTHKVG

SEQ ID NO: 1766 - protein, 15 aa, Hepatitis B virus
NVSIPWTHKVGNFTG

SEQ ID NO: 1767 - protein, 15 aa, Hepatitis B virus
PWTHKVGNFTGLYSS

SEQ ID NO: 1768 - protein, 15 aa, Hepatitis B virus
KVGNFTGLYSSTVPI

SEQ ID NO: 1769 - protein, 15 aa, Hepatitis B virus
FTGLYSSTVPIFNPE

SEQ ID NO: 1770 - protein, 15 aa, Hepatitis B virus
YSSTVPIFNPEWQTP

SEQ ID NO: 1771 - protein, 15 aa, Hepatitis B virus
VPIFNPEWQTPSFPK

SEQ ID NO: 1772 - protein, 15 aa, Hepatitis B virus
NPEWQTPSFPKIHLQ

SEQ ID NO: 1773 - protein, 15 aa, Hepatitis B virus
QTPSFPKIHLQEDII

SEQ ID NO: 1774 - protein, 15 aa, Hepatitis B virus
FPKIHLQEDIINRCQ

SEQ ID NO: 1775 - protein, 15 aa, Hepatitis B virus
HLQEDIINRCQQFVG

SEQ ID NO: 1776 - protein, 15 aa, Hepatitis B virus
DIINRCQQFVGPLTV

SEQ ID NO: 1777 - protein, 15 aa, Hepatitis B virus
RCQQFVGPLTVNEKR

SEQ ID NO: 1778 - protein, 15 aa, Hepatitis B virus
FVGPLTVNEKRRLKL

SEQ ID NO: 1779 - protein, 15 aa, Hepatitis B virus
LTVNEKRRLKLIMPA

SEQ ID NO: 1780 - protein, 15 aa, Hepatitis B virus
EKRRLKLIMPARFYP

SEQ ID NO: 1781 - protein, 15 aa, Hepatitis B virus
LKLIMPARFYPTTKY

SEQ ID NO: 1782 - protein, 15 aa, Hepatitis B virus
MPARFYPTTKYLPLD

SEQ ID NO: 1783 - protein, 15 aa, Hepatitis B virus
FYPTTKYLPLDKGIK

SEQ ID NO: 1784 - protein, 15 aa, Hepatitis B virus
TKYLPLDKGIKPYYP

SEQ ID NO: 1785 - protein, 15 aa, Hepatitis B virus
PLDKGIKPYYPDQVV

SEQ ID NO: 1786 - protein, 15 aa, Hepatitis B virus
GIKPYYPDQVVNHYF

SEQ ID NO: 1787 - protein, 15 aa, Hepatitis B virus
YYPDQVVNHYFQTRH

SEQ ID NO: 1788 - protein, 15 aa, Hepatitis B virus
QVVNHYFQTRHYLHT

SEQ ID NO: 1789 - protein, 15 aa, Hepatitis B virus
HYFQTRHYLHTLWKA

SEQ ID NO: 1790 - protein, 15 aa, Hepatitis B virus
TRHYLHTLWKAGILY

SEQ ID NO: 1791 - protein, 15 aa, Hepatitis B virus
LHTLWKAGILYKRET

SEQ ID NO: 1792 - protein, 15 aa, Hepatitis B virus
WKAGILYKRETTRSA

SEQ ID NO: 1793 - protein, 15 aa, Hepatitis B virus
ILYKRETTRSASFCG

SEQ ID NO: 1794 - protein, 15 aa, Hepatitis B virus
RETTRSASFCGSPYS

SEQ ID NO: 1795 - protein, 15 aa, Hepatitis B virus
RSASFCGSPYSWEQE

SEQ ID NO: 1796 - protein, 15 aa, Hepatitis B virus
FCGSPYSWEQELQHG

SEQ ID NO: 1797 - protein, 15 aa, Hepatitis B virus
PYSWEQELQHGRLVI

SEQ ID NO: 1798 - protein, 15 aa, Hepatitis B virus
EQELQHGRLVIKTSQ

SEQ ID NO: 1799 - protein, 15 aa, Hepatitis B virus
QHGRLVIKTSQRHGD

SEQ ID NO: 1800 - protein, 15 aa, Hepatitis B virus
LVIKTSQRHGDESFC

SEQ ID NO: 1801 - protein, 15 aa, Hepatitis B virus
TSQRHGDESFCSQPS

SEQ ID NO: 1802 - protein, 15 aa, Hepatitis B virus
HGDESFCSQPSGILS

SEQ ID NO: 1803 - protein, 15 aa, Hepatitis B virus
SFCSQPSGILSRSSV

SEQ ID NO: 1804 - protein, 15 aa, Hepatitis B virus
QPSGILSRSSVGPCI

SEQ ID NO: 1805 - protein, 15 aa, Hepatitis B virus
ILSRSSVGPCIRSQL

SEQ ID NO: 1806 - protein, 15 aa, Hepatitis B virus
SSVGPCIRSQLKQSR

SEQ ID NO: 1807 - protein, 15 aa, Hepatitis B virus
PCIRSQLKQSRLGLQ

SEQ ID NO: 1808 - protein, 15 aa, Hepatitis B virus
SQLKQSRLGLQPHQG

SEQ ID NO: 1809 - protein, 15 aa, Hepatitis B virus
QSRLGLQPHQGPLAS

SEQ ID NO: 1810 - protein, 15 aa, Hepatitis B virus
GLQPHQGPLASSQPG

SEQ ID NO: 1811 - protein, 15 aa, Hepatitis B virus
HQGPLASSQPGRSGS

SEQ ID NO: 1812 - protein, 15 aa, Hepatitis B virus
LASSQPGRSGSIRAR

SEQ ID NO: 1813 - protein, 15 aa, Hepatitis B virus
QPGRSGSIRARAHPS

SEQ ID NO: 1814 - protein, 15 aa, Hepatitis B virus
SGSIRARAHPSTRRY

SEQ ID NO: 1815 - protein, 15 aa, Hepatitis B virus
RARAHPSTRRYFGVE

SEQ ID NO: 1816 - protein, 15 aa, Hepatitis B virus
HPSTRRYFGVEPSGS

SEQ ID NO: 1817 - protein, 15 aa, Hepatitis B virus
RRYFGVEPSGSGHID

SEQ ID NO: 1818 - protein, 15 aa, Hepatitis B virus
GVEPSGSGHIDHSVN

SEQ ID NO: 1819 - protein, 15 aa, Hepatitis B virus
SGSGHIDHSVNNSSS

SEQ ID NO: 1820 - protein, 15 aa, Hepatitis B virus
HIDHSVNNSSSCLHQ

SEQ ID NO: 1821 - protein, 15 aa, Hepatitis B virus
SVNNSSSCLHQSAVR

SEQ ID NO: 1822 - protein, 15 aa, Hepatitis B virus
SSSCLHQSAVRKAAY

SEQ ID NO: 1823 - protein, 15 aa, Hepatitis B virus
LHQSAVRKAAYSHLS

SEQ ID NO: 1824 - protein, 15 aa, Hepatitis B virus
AVRKAAYSHLSTSKR

SEQ ID NO: 1825 - protein, 15 aa, Hepatitis B virus
AAYSHLSTSKRQSSS

SEQ ID NO: 1826 - protein, 15 aa, Hepatitis B virus
HLSTSKRQSSSGHAV

SEQ ID NO: 1827 - protein, 15 aa, Hepatitis B virus
SKRQSSSGHAVEFHC

SEQ ID NO: 1828 - protein, 15 aa, Hepatitis B virus
SSSGHAVEFHCLPPS

SEQ ID NO: 1829 - protein, 15 aa, Hepatitis B virus
HAVEFHCLPPSSAGS

SEQ ID NO: 1830 - protein, 15 aa, Hepatitis B virus
FHCLPPSSAGSQSQG

SEQ ID NO: 1831 - protein, 15 aa, Hepatitis B virus
PPSSAGSQSQGSVSS

SEQ ID NO: 1832 - protein, 15 aa, Hepatitis B virus
AGSQSQGSVSSCWWL

SEQ ID NO: 1833 - protein, 15 aa, Hepatitis B virus
SQGSVSSCWWLQFRN

SEQ ID NO: 1834 - protein, 15 aa, Hepatitis B virus
VSSCWWLQFRNSKPC

SEQ ID NO: 1835 - protein, 15 aa, Hepatitis B virus
WWLQFRNSKPCSEYC

SEQ ID NO: 1836 - protein, 15 aa, Hepatitis B virus
FRNSKPCSEYCLSHL

SEQ ID NO: 1837 - protein, 15 aa, Hepatitis B virus
KPCSEYCLSHLVNLR

SEQ ID NO: 1838 - protein, 15 aa, Hepatitis B virus
EYCLSHLVNLREDWG

SEQ ID NO: 1839 - protein, 15 aa, Hepatitis B virus
SHLVNLREDWGPCDE

SEQ ID NO: 1840 - protein, 15 aa, Hepatitis B virus
NLREDWGPCDEHGEH

SEQ ID NO: 1841 - protein, 15 aa, Hepatitis B virus
DWGPCDEHGEHHIRI

SEQ ID NO: 1842 - protein, 15 aa, Hepatitis B virus
CDEHGEHHIRIPRTP

SEQ ID NO: 1843 - protein, 15 aa, Hepatitis B virus
GEHHIRIPRTPARVT

SEQ ID NO: 1844 - protein, 15 aa, Hepatitis B virus
IRIPRTPARVTGGVF

SEQ ID NO: 1845 - protein, 15 aa, Hepatitis B virus
RTPARVTGGVFLVDK

SEQ ID NO: 1846 - protein, 15 aa, Hepatitis B virus
RVTGGVFLVDKNPHN

SEQ ID NO: 1847 - protein, 15 aa, Hepatitis B virus
GVFLVDKNPHNTAES

SEQ ID NO: 1848 - protein, 15 aa, Hepatitis B virus
VDKNPHNTAESRLVV

SEQ ID NO: 1849 - protein, 15 aa, Hepatitis B virus
PHNTAESRLVVDFSQ

SEQ ID NO: 1850 - protein, 15 aa, Hepatitis B virus
AESRLVVDFSQFSRG

SEQ ID NO: 1851 - protein, 15 aa, Hepatitis B virus
LVVDFSQFSRGITRV

SEQ ID NO: 1852 - protein, 15 aa, Hepatitis B virus
FSQFSRGITRVSWPK

SEQ ID NO: 1853 - protein, 15 aa, Hepatitis B virus
SRGITRVSWPKFAVP

SEQ ID NO: 1854 - protein, 15 aa, Hepatitis B virus
TRVSWPKFAVPNLQS

SEQ ID NO: 1855 - protein, 15 aa, Hepatitis B virus
WPKFAVPNLQSLTNL

SEQ ID NO: 1856 - protein, 15 aa, Hepatitis B virus
AVPNLQSLTNLLSSN

SEQ ID NO: 1857 - protein, 15 aa, Hepatitis B virus
LQSLTNLLSSNLSWL

SEQ ID NO: 1858 - protein, 15 aa, Hepatitis B virus
TNLLSSNLSWLSLDV

SEQ ID NO: 1859 - protein, 15 aa, Hepatitis B virus
SSNLSWLSLDVSAAF

SEQ ID NO: 1860 - protein, 15 aa, Hepatitis B virus
SWLSLDVSAAFYHIP

SEQ ID NO: 1861 - protein, 15 aa, Hepatitis B virus
LDVSAAFYHIPLHPA

SEQ ID NO: 1862 - protein, 15 aa, Hepatitis B virus
AAFYHIPLHPAAMPH

SEQ ID NO: 1863 - protein, 15 aa, Hepatitis B virus
HIPLHPAAMPHLLIG

SEQ ID NO: 1864 - protein, 15 aa, Hepatitis B virus
HPAAMPHLLIGSSGL

SEQ ID NO: 1865 - protein, 15 aa, Hepatitis B virus
MPHLLIGSSGLSRYV

SEQ ID NO: 1866 - protein, 15 aa, Hepatitis B virus
LIGSSGLSRYVARLS

SEQ ID NO: 1867 - protein, 15 aa, Hepatitis B virus
SGLSRYVARLSSNSR

SEQ ID NO: 1868 - protein, 15 aa, Hepatitis B virus
RYVARLSSNSRINNN

SEQ ID NO: 1869 - protein, 15 aa, Hepatitis B virus
RLSSNSRINNNQYGT

SEQ ID NO: 1870 - protein, 15 aa, Hepatitis B virus
NSRINNNQYGTMQNL

SEQ ID NO: 1871 - protein, 15 aa, Hepatitis B virus
NNNQYGTMQNLHDSC

SEQ ID NO: 1872 - protein, 15 aa, Hepatitis B virus
YGTMQNLHDSCSRQL

SEQ ID NO: 1873 - protein, 15 aa, Hepatitis B virus
QNLHDSCSRQLYVSL

SEQ ID NO: 1874 - protein, 15 aa, Hepatitis B virus
DSCSRQLYVSLMLLY

SEQ ID NO: 1875 - protein, 15 aa, Hepatitis B virus
RQLYVSLMLLYKTYG

SEQ ID NO: 1876 - protein, 15 aa, Hepatitis B virus
VSLMLLYKTYGWKLH

SEQ ID NO: 1877 - protein, 15 aa, Hepatitis B virus
LLYKTYGWKLHLYSH

SEQ ID NO: 1878 - protein, 15 aa, Hepatitis B virus
TYGWKLHLYSHPIVL

SEQ ID NO: 1879 - protein, 15 aa, Hepatitis B virus
KLHLYSHPIVLGFRK

SEQ ID NO: 1880 - protein, 15 aa, Hepatitis B virus
YSHPIVLGFRKIPMG

SEQ ID NO: 1881 - protein, 15 aa, Hepatitis B virus
IVLGFRKIPMGVGLS

SEQ ID NO: 1882 - protein, 15 aa, Hepatitis B virus
FRKIPMGVGLSPFLL

SEQ ID NO: 1883 - protein, 15 aa, Hepatitis B virus
PMGVGLSPFLLAQFT

SEQ ID NO: 1884 - protein, 15 aa, Hepatitis B virus
GLSPFLLAQFTSAIC

SEQ ID NO: 1885 - protein, 15 aa, Hepatitis B virus
FLLAQFTSAICSVVR

SEQ ID NO: 1886 - protein, 15 aa, Hepatitis B virus
QFTSAICSVVRRAFP

SEQ ID NO: 1887 - protein, 15 aa, Hepatitis B virus
AICSVVRRAFPHCLA

SEQ ID NO: 1888 - protein, 15 aa, Hepatitis B virus
VVRRAFPHCLAFSYM

SEQ ID NO: 1889 - protein, 15 aa, Hepatitis B virus
AFPHCLAFSYMDDVV

SEQ ID NO: 1890 - protein, 15 aa, Hepatitis B virus
CLAFSYMDDVVLGAK

SEQ ID NO: 1891 - protein, 15 aa, Hepatitis B virus
SYMDDVVLGAKSVQH

SEQ ID NO: 1892 - protein, 15 aa, Hepatitis B virus
DVVLGAKSVQHRESL

SEQ ID NO: 1893 - protein, 15 aa, Hepatitis B virus
GAKSVQHRESLYTAV

SEQ ID NO: 1894 - protein, 15 aa, Hepatitis B virus
VQHRESLYTAVTNFL

SEQ ID NO: 1895 - protein, 15 aa, Hepatitis B virus
ESLYTAVTNFLLSLG

SEQ ID NO: 1896 - protein, 15 aa, Hepatitis B virus
TAVTNFLLSLGIHLN

SEQ ID NO: 1897 - protein, 15 aa, Hepatitis B virus
NFLLSLGIHLNPNKT

SEQ ID NO: 1898 - protein, 15 aa, Hepatitis B virus
SLGIHLNPNKTKRWG

SEQ ID NO: 1899 - protein, 15 aa, Hepatitis B virus
HLNPNKTKRWGYSLN

SEQ ID NO: 1900 - protein, 15 aa, Hepatitis B virus
NKTKRWGYSLNFMGY

SEQ ID NO: 1901 - protein, 15 aa, Hepatitis B virus
RWGYSLNFMGYIIGS

SEQ ID NO: 1902 - protein, 15 aa, Hepatitis B virus
SLNFMGYIIGSWGTL

SEQ ID NO: 1903 - protein, 15 aa, Hepatitis B virus
MGYIIGSWGTLPQDH

SEQ ID NO: 1904 - protein, 15 aa, Hepatitis B virus
IGSWGTLPQDHIVQK

SEQ ID NO: 1905 - protein, 15 aa, Hepatitis B virus
GTLPQDHIVQKIKHC

SEQ ID NO: 1906 - protein, 15 aa, Hepatitis B virus
QDHIVQKIKHCFRKL

SEQ ID NO: 1907 - protein, 15 aa, Hepatitis B virus
VQKIKHCFRKLPVNR

SEQ ID NO: 1908 - protein, 15 aa, Hepatitis B virus
KHCFRKLPVNRPIDW

SEQ ID NO: 1909 - protein, 15 aa, Hepatitis B virus
RKLPVNRPIDWKVCQ

SEQ ID NO: 1910 - protein, 15 aa, Hepatitis B virus
VNRPIDWKVCQRIVG

SEQ ID NO: 1911 - protein, 15 aa, Hepatitis B virus
IDWKVCQRIVGLLGF

SEQ ID NO: 1912 - protein, 15 aa, Hepatitis B virus
VCQRIVGLLGFAAPF

SEQ ID NO: 1913 - protein, 15 aa, Hepatitis B virus
IVGLLGFAAPFTQCG

SEQ ID NO: 1914 - protein, 15 aa, Hepatitis B virus
LGFAAPFTQCGYPAL

SEQ ID NO: 1915 - protein, 15 aa, Hepatitis B virus
APFTQCGYPALMPLY

SEQ ID NO: 1916 - protein, 15 aa, Hepatitis B virus
QCGYPALMPLYACIQ

SEQ ID NO: 1917 - protein, 15 aa, Hepatitis B virus
PALMPLYACIQAKQA

SEQ ID NO: 1918 - protein, 15 aa, Hepatitis B virus
PLYACIQAKQAFTFS

SEQ ID NO: 1919 - protein, 15 aa, Hepatitis B virus
CIQAKQAFTFSPTYK

SEQ ID NO: 1920 - protein, 15 aa, Hepatitis B virus
KQAFTFSPTYKAFLS

SEQ ID NO: 1921 - protein, 15 aa, Hepatitis B virus
TFSPTYKAFLSKQYM

SEQ ID NO: 1922 - protein, 15 aa, Hepatitis B virus
TYKAFLSKQYMNLYP

SEQ ID NO: 1923 - protein, 15 aa, Hepatitis B virus
FLSKQYMNLYPVARQ

SEQ ID NO: 1924 - protein, 15 aa, Hepatitis B virus
QYMNLYPVARQRPGL

SEQ ID NO: 1925 - protein, 15 aa, Hepatitis B virus
LYPVARQRPGLCQVF

SEQ ID NO: 1926 - protein, 15 aa, Hepatitis B virus
ARQRPGLCQVFADAT

SEQ ID NO: 1927 - protein, 15 aa, Hepatitis B virus
PGLCQVFADATPTGW

SEQ ID NO: 1928 - protein, 15 aa, Hepatitis B virus
QVFADATPTGWGLAI

SEQ ID NO: 1929 - protein, 15 aa, Hepatitis B virus
DATPTGWGLAIGHQR

SEQ ID NO: 1930 - protein, 15 aa, Hepatitis B virus
TGWGLAIGHQRMRGT

SEQ ID NO: 1931 - protein, 15 aa, Hepatitis B virus
LAIGHQRMRGTFVAP

SEQ ID NO: 1932 - protein, 15 aa, Hepatitis B virus
HQRMRGTFVAPLPIH

SEQ ID NO: 1933 - protein, 15 aa, Hepatitis B virus
RGTFVAPLPIHTAEL

SEQ ID NO: 1934 - protein, 15 aa, Hepatitis B virus
VAPLPIHTAELLAAC

SEQ ID NO: 1935 - protein, 15 aa, Hepatitis B virus
PIHTAELLAACFARS

SEQ ID NO: 1936 - protein, 15 aa, Hepatitis B virus
AELLAACFARSRSGA

SEQ ID NO: 1937 - protein, 15 aa, Hepatitis B virus
AACFARSRSGAKLIG

SEQ ID NO: 1938 - protein, 15 aa, Hepatitis B virus
ARSRSGAKLIGTDNS

SEQ ID NO: 1939 - protein, 15 aa, Hepatitis B virus
SGAKLIGTDNSVVLS

SEQ ID NO: 1940 - protein, 15 aa, Hepatitis B virus
LIGTDNSVVLSRKYT

SEQ ID NO: 1941 - protein, 15 aa, Hepatitis B virus
DNSVVLSRKYTSFPW

SEQ ID NO: 1942 - protein, 15 aa, Hepatitis B virus
VLSRKYTSFPWLLGC

SEQ ID NO: 1943 - protein, 15 aa, Hepatitis B virus
KYTSFPWLLGCTANW

SEQ ID NO: 1944 - protein, 15 aa, Hepatitis B virus
FPWLLGCTANWILRG

SEQ ID NO: 1945 - protein, 15 aa, Hepatitis B virus
LGCTANWILRGTSFV

SEQ ID NO: 1946 - protein, 15 aa, Hepatitis B virus
ANWILRGTSFVYVPS

SEQ ID NO: 1947 - protein, 15 aa, Hepatitis B virus
LRGTSFVYVPSALNP

SEQ ID NO: 1948 - protein, 15 aa, Hepatitis B virus
SFVYVPSALNPADDP

SEQ ID NO: 1949 - protein, 15 aa, Hepatitis B virus
VPSALNPADDPSRGR

SEQ ID NO: 1950 - protein, 15 aa, Hepatitis B virus
LNPADDPSRGRLGLS

SEQ ID NO: 1951 - protein, 15 aa, Hepatitis B virus
DDPSRGRLGLSRPLL

SEQ ID NO: 1952 - protein, 15 aa, Hepatitis B virus
RGRLGLSRPLLRLPF

SEQ ID NO: 1953 - protein, 15 aa, Hepatitis B virus
GLSRPLLRLPFQPTT

SEQ ID NO: 1954 - protein, 15 aa, Hepatitis B virus
PLLRLPFQPTTGRTS

SEQ ID NO: 1955 - protein, 15 aa, Hepatitis B virus
LPFQPTTGRTSLYAV

SEQ ID NO: 1956 - protein, 15 aa, Hepatitis B virus
PTTGRTSLYAVSPSV

SEQ ID NO: 1957 - protein, 15 aa, Hepatitis B virus
RTSLYAVSPSVPSHL

SEQ ID NO: 1958 - protein, 15 aa, Hepatitis B virus
YAVSPSVPSHLPVRV

SEQ ID NO: 1959 - protein, 15 aa, Hepatitis B virus
PSVPSHLPVRVHFAS

SEQ ID NO: 1960 - protein, 15 aa, Hepatitis B virus
SHLPVRVHFASPLHV

SEQ ID NO: 1961 - protein, 15 aa, Hepatitis B virus
VRVHFASPLHVAWRP

SEQ ID NO: 1962 - protein, 15 aa, Hepatitis B virus
RVHFASPLHVAWRPP

SEQ ID NO: 1963 - protein, 15 aa, Hepatitis B virus
MQLFHLCLIISCTCP

SEQ ID NO: 1964 - protein, 15 aa, Hepatitis B virus
HLCLIISCTCPTVQA

SEQ ID NO: 1965 - protein, 15 aa, Hepatitis B virus
IISCTCPTVQASKLC

SEQ ID NO: 1966 - protein, 15 aa, Hepatitis B virus
TCPTVQASKLCLGWL

SEQ ID NO: 1967 - protein, 15 aa, Hepatitis B virus
VQASKLCLGWLWGMD

SEQ ID NO: 1968 - protein, 15 aa, Hepatitis B virus
KLCLGWLWGMDIDPY

SEQ ID NO: 1969 - protein, 15 aa, Hepatitis B virus
GWLWGMDIDPYKEFG

SEQ ID NO: 1970 - protein, 15 aa, Hepatitis B virus
GMDIDPYKEFGATVE

SEQ ID NO: 1971 - protein, 15 aa, Hepatitis B virus
DPYKEFGATVELLSF

SEQ ID NO: 1972 - protein, 15 aa, Hepatitis B virus
EFGATVELLSFLPSD

SEQ ID NO: 1973 - protein, 15 aa, Hepatitis B virus
TVELLSFLPSDFFPS

SEQ ID NO: 1974 - protein, 15 aa, Hepatitis B virus
LSFLPSDFFPSVRDL

SEQ ID NO: 1975 - protein, 15 aa, Hepatitis B virus
PSDFFPSVRDLLDTA

SEQ ID NO: 1976 - protein, 15 aa, Hepatitis B virus
FPSVRDLLDTASALY

SEQ ID NO: 1977 - protein, 15 aa, Hepatitis B virus
RDLLDTASALYREAL

SEQ ID NO: 1978 - protein, 15 aa, Hepatitis B virus
DTASALYREALESPE

SEQ ID NO: 1979 - protein, 15 aa, Hepatitis B virus
ALYREALESPEHCSP

SEQ ID NO: 1980 - protein, 15 aa, Hepatitis B virus
EALESPEHCSPHHTA

SEQ ID NO: 1981 - protein, 15 aa, Hepatitis B virus
SPEHCSPHHTALRQA

SEQ ID NO: 1982 - protein, 15 aa, Hepatitis B virus
CSPHHTALRQAILCW

SEQ ID NO: 1983 - protein, 15 aa, Hepatitis B virus
HTALRQAILCWGELM

SEQ ID NO: 1984 - protein, 15 aa, Hepatitis B virus
RQAILCWGELMTLAT

SEQ ID NO: 1985 - protein, 15 aa, Hepatitis B virus
LCWGELMTLATWVGN

SEQ ID NO: 1986 - protein, 15 aa, Hepatitis B virus
ELMTLATWVGNNLED

SEQ ID NO: 1987 - protein, 15 aa, Hepatitis B virus
LATWVGNNLEDPASR

SEQ ID NO: 1988 - protein, 15 aa, Hepatitis B virus
VGNNLEDPASRDLVV

SEQ ID NO: 1989 - protein, 15 aa, Hepatitis B virus
LEDPASRDLVVNYVN

SEQ ID NO: 1990 - protein, 15 aa, Hepatitis B virus
ASRDLVVNYVNTNMG

SEQ ID NO: 1991 - protein, 15 aa, Hepatitis B virus
LVVNYVNTNMGLKIR

SEQ ID NO: 1992 - protein, 15 aa, Hepatitis B virus
YVNTNMGLKIRQLLW

SEQ ID NO: 1993 - protein, 15 aa, Hepatitis B virus
NMGLKIRQLLWFHIS

SEQ ID NO: 1994 - protein, 15 aa, Hepatitis B virus
KIRQLLWFHISCLTF

SEQ ID NO: 1995 - protein, 15 aa, Hepatitis B virus
LLWFHISCLTFGRET

SEQ ID NO: 1996 - protein, 15 aa, Hepatitis B virus
HISCLTFGRETVLEY

SEQ ID NO: 1997 - protein, 15 aa, Hepatitis B virus
LTFGRETVLEYLVSF

SEQ ID NO: 1998 - protein, 15 aa, Hepatitis B virus
RETVLEYLVSFGVWI

SEQ ID NO: 1999 - protein, 15 aa, Hepatitis B virus
LEYLVSFGVWIRTPP

SEQ ID NO: 2000 - protein, 15 aa, Hepatitis B virus
VSFGVWIRTPPAYRP

SEQ ID NO: 2001 - protein, 15 aa, Hepatitis B virus
VWIRTPPAYRPPNAP

SEQ ID NO: 2002 - protein, 15 aa, Hepatitis B virus
TPPAYRPPNAPILST

SEQ ID NO: 2003 - protein, 15 aa, Hepatitis B virus
YRPPNAPILSTLPET

SEQ ID NO: 2004 - protein, 15 aa, Hepatitis B virus
NAPILSTLPETTVVR

SEQ ID NO: 2005 - protein, 15 aa, Hepatitis B virus
LSTLPETTVVRRRDR

SEQ ID NO: 2006 - protein, 15 aa, Hepatitis B virus
PETTVVRRRDRGRSP

SEQ ID NO: 2007 - protein, 15 aa, Hepatitis B virus
VVRRRDRGRSPRRRT

SEQ ID NO: 2008 - protein, 15 aa, Hepatitis B virus
RDRGRSPRRRTPSPR

SEQ ID NO: 2009 - protein, 15 aa, Hepatitis B virus
RSPRRRTPSPRRRRS

SEQ ID NO: 2010 - protein, 15 aa, Hepatitis B virus
RRTPSPRRRRSQSPR

SEQ ID NO: 2011 - protein, 15 aa, Hepatitis B virus
SPRRRRSQSPRRRRS

SEQ ID NO: 2012 - protein, 15 aa, Hepatitis B virus
RRSQSPRRRRSQSRE

SEQ ID NO: 2013 - protein, 15 aa, Hepatitis B virus
QSPRRRRSQSRESQC

SEQ ID NO: 2014 - protein, 15 aa, Hepatitis B virus
MGQNLSTSNPLGFFP

SEQ ID NO: 2015 - protein, 15 aa, Hepatitis B virus
LDPAFRANTANPDWD

SEQ ID NO: 2016 - protein, 15 aa, Hepatitis B virus
NPNKDTWPDANKVGA

SEQ ID NO: 2017 - protein, 15 aa, Hepatitis B virus
DTWPDANKVGAGAFG

SEQ ID NO: 2018 - protein, 15 aa, Hepatitis B virus
DWDFNPNKDTWPDAN

SEQ ID NO: 2019 - protein, 15 aa, Hepatitis B virus
NPNKDHWPEANQVGA

SEQ ID NO: 2020 - protein, 15 aa, Hepatitis B virus
DHWPEANQVGAGAFG

SEQ ID NO: 2021 - protein, 15 aa, Hepatitis B virus
DWDFNPNKDHWPEAN

SEQ ID NO: 2022 - protein, 15 aa, Hepatitis B virus
NPHKDNWPDANKVGV

SEQ ID NO: 2023 - protein, 15 aa, Hepatitis B virus
DNWPDANKVGVGAFG

SEQ ID NO: 2024 - protein, 15 aa, Hepatitis B virus
DWDLNPHKDNWPDAN

SEQ ID NO: 2025 - protein, 15 aa, Hepatitis B virus
QGILQTLPANPPPAS

SEQ ID NO: 2026 - protein, 15 aa, Hepatitis B virus
QTLPANPPPASTNRQ

SEQ ID NO: 2027 - protein, 15 aa, Hepatitis B virus
SPQAQGILQTLPANP

SEQ ID NO: 2028 - protein, 15 aa, Hepatitis B virus
QGILTTVPAAPPPAS

SEQ ID NO: 2029 - protein, 15 aa, Hepatitis B virus
QPTPLSPPLRDTHPQ

SEQ ID NO: 2030 - protein, 15 aa, Hepatitis B virus
LSPPLRNTHPQAMQW

SEQ ID NO: 2031 - protein, 15 aa, Hepatitis B virus
NSTTFHQTLQDPRVR

SEQ ID NO: 2032 - protein, 15 aa, Hepatitis B virus
GTVNPVPTTASPISS

SEQ ID NO: 2033 - protein, 15 aa, Hepatitis B virus
PVPTTASPISSIFSR

SEQ ID NO: 2034 - protein, 15 aa, Hepatitis B virus
TASPISSIFSRIGDP

SEQ ID NO: 2035 - protein, 15 aa, Hepatitis B virus
ISSIFSRIGDPALNM

SEQ ID NO: 2036 - protein, 15 aa, Hepatitis B virus
FSRIGDPALNMENIT

SEQ ID NO: 2037 - protein, 15 aa, Hepatitis B virus
GDPALNMENITSGFL

SEQ ID NO: 2038 - protein, 15 aa, Hepatitis B virus
GTVSPAQNTVSAISS

SEQ ID NO: 2039 - protein, 15 aa, Hepatitis B virus
PAQNTVSAISSILSK

SEQ ID NO: 2040 - protein, 15 aa, Hepatitis B virus
TVSAISSILSKTGDP

SEQ ID NO: 2041 - protein, 15 aa, Hepatitis B virus
ISSILSKTGDPVPNM

SEQ ID NO: 2042 - protein, 15 aa, Hepatitis B virus
LSKTGDPVPNMENIA

SEQ ID NO: 2043 - protein, 15 aa, Hepatitis B virus
GDPVPNMENIASGLL

SEQ ID NO: 2044 - protein, 15 aa, Hepatitis B virus
NFLGGTTVCLGQNSQ

SEQ ID NO: 2045 - protein, 15 aa, Hepatitis B virus
LNFLGGAPTCPGQNS

SEQ ID NO: 2046 - protein, 15 aa, Hepatitis B virus
NSQSQISSHSPTCCP

SEQ ID NO: 2047 - protein, 15 aa, Hepatitis B virus
QISSHSPTCCPPICP

SEQ ID NO: 2048 - protein, 15 aa, Hepatitis B virus
PVCPLLPGTSTTSTG

SEQ ID NO: 2049 - protein, 15 aa, Hepatitis B virus
PSSWAFGKFLWEWAS

SEQ ID NO: 2050 - protein, 15 aa, Hepatitis B virus
PSSWAFARFLWEWAS

SEQ ID NO: 2051 - protein, 15 aa, Hepatitis B virus
WGPSLYSILSPFLPL

SEQ ID NO: 2052 - protein, 15 aa, Hepatitis B virus
WGPSLYNILSPFMPL

SEQ ID NO: 2053 - protein, 15 aa, Hepatitis B virus
AARVCCQLDPARDVL

SEQ ID NO: 2054 - protein, 15 aa, Hepatitis B virus
AARLCCQLDPARDVL

SEQ ID NO: 2055 - protein, 15 aa, Hepatitis B virus
RGRPLPGPLGALPPA

SEQ ID NO: 2056 - protein, 15 aa, Hepatitis B virus
LPGPLGALPPASPSA

SEQ ID NO: 2057 - protein, 15 aa, Hepatitis B virus
LGALPPASPSAVPSD

SEQ ID NO: 2058 - protein, 15 aa, Hepatitis B virus
RGRPVSGPFGPLPSP

SEQ ID NO: 2059 - protein, 15 aa, Hepatitis B virus
VSGPFGPLPSPSSSA

SEQ ID NO: 2060 - protein, 15 aa, Hepatitis B virus
FGPLPSPSSSAVPAD

SEQ ID NO: 2061 - protein, 15 aa, Hepatitis B virus
PSPSSSAVPADHGAH

SEQ ID NO: 2062 - protein, 15 aa, Hepatitis B virus
SPSAVPTDHGAHLSL

SEQ ID NO: 2063 - protein, 15 aa, Hepatitis B virus
TTVNAHRNLPKVLHK

SEQ ID NO: 2064 - protein, 15 aa, Hepatitis B virus
AYFKDCVFNEWEELG

SEQ ID NO: 2065 - protein, 15 aa, Hepatitis B virus
GEEIRLKVFVLGGCR

SEQ ID NO: 2066 - protein, 15 aa, Hepatitis B virus
LLLLDDEAGPLEEEL

SEQ ID NO: 2067 - protein, 15 aa, Hepatitis B virus
ELPRLADEGLNRRVA

SEQ ID NO: 2068 - protein, 15 aa, Hepatitis B virus
VPVFNPHWKTPSFPN

SEQ ID NO: 2069 - protein, 15 aa, Hepatitis B virus
NIHLHQDIIKKCEQF

SEQ ID NO: 2070 - protein, 15 aa, Hepatitis B virus
HQDIIKKCEQFVGPL

SEQ ID NO: 2071 - protein, 15 aa, Hepatitis B virus
IKKCEQFVGPLTVNE

SEQ ID NO: 2072 - protein, 15 aa, Hepatitis B virus
NIHLQEDIINRCQQY

SEQ ID NO: 2073 - protein, 15 aa, Hepatitis B virus
QEDIINRCQQYVGPL

SEQ ID NO: 2074 - protein, 15 aa, Hepatitis B virus
INRCQQYVGPLTVNE

SEQ ID NO: 2075 - protein, 15 aa, Hepatitis B virus
QQYVGPLTVNEKRRL

SEQ ID NO: 2076 - protein, 15 aa, Hepatitis B virus
DIHLQEDIVDRCKQF

SEQ ID NO: 2077 - protein, 15 aa, Hepatitis B virus
QEDIVDRCKQFVGPL

SEQ ID NO: 2078 - protein, 15 aa, Hepatitis B virus
VDRCKQFVGPLTVNE

SEQ ID NO: 2079 - protein, 15 aa, Hepatitis B virus
IKPYYPEHLVNHYFQ

SEQ ID NO: 2080 - protein, 15 aa, Hepatitis B virus
WEQELQHGAESFHQQ

SEQ ID NO: 2081 - protein, 15 aa, Hepatitis B virus
LQHGAESFHQQSSGI

SEQ ID NO: 2082 - protein, 15 aa, Hepatitis B virus
LQHGRLVFQTSTRHG

SEQ ID NO: 2083 - protein, 15 aa, Hepatitis B virus
RLVFQTSTRHGDESF

SEQ ID NO: 2084 - protein, 15 aa, Hepatitis B virus
QTSTRHGDESFCSQS

SEQ ID NO: 2085 - protein, 15 aa, Hepatitis B virus
RHGDESFCSQSSGIL

SEQ ID NO: 2086 - protein, 15 aa, Hepatitis B virus
SSGILSRPPVGSSLQ

SEQ ID NO: 2087 - protein, 15 aa, Hepatitis B virus
LSRPPVGSSLQSKHR

SEQ ID NO: 2088 - protein, 15 aa, Hepatitis B virus
PVGSSLQSKHRKSRL

SEQ ID NO: 2089 - protein, 15 aa, Hepatitis B virus
SLQSKHRKSRLGLQS

SEQ ID NO: 2090 - protein, 15 aa, Hepatitis B virus
KHRKSRLGLQSQQGH

SEQ ID NO: 2091 - protein, 15 aa, Hepatitis B virus
SRLGLQSQQGHLARR

SEQ ID NO: 2092 - protein, 15 aa, Hepatitis B virus
LQSQQGHLARRQQGR

SEQ ID NO: 2093 - protein, 15 aa, Hepatitis B virus
QGHLARRQQGRSWSI

SEQ ID NO: 2094 - protein, 15 aa, Hepatitis B virus
ARRQQGRSWSIRAGF

SEQ ID NO: 2095 - protein, 15 aa, Hepatitis B virus
QGRSWSIRAGFHPTA

SEQ ID NO: 2096 - protein, 15 aa, Hepatitis B virus
WSIRAGFHPTARRPF

SEQ ID NO: 2097 - protein, 15 aa, Hepatitis B virus
AGFHPTARRPFGVEP

SEQ ID NO: 2098 - protein, 15 aa, Hepatitis B virus
PTARRPFGVEPSGSG

SEQ ID NO: 2099 - protein, 15 aa, Hepatitis B virus
RPFGVEPSGSGHTTN

SEQ ID NO: 2100 - protein, 15 aa, Hepatitis B virus
VEPSGSGHTTNFASK

SEQ ID NO: 2101 - protein, 15 aa, Hepatitis B virus
GSGHTTNFASKSASC

SEQ ID NO: 2102 - protein, 15 aa, Hepatitis B virus
TTNFASKSASCLYQS

SEQ ID NO: 2103 - protein, 15 aa, Hepatitis B virus
ASKSASCLYQSPVRK

SEQ ID NO: 2104 - protein, 15 aa, Hepatitis B virus
CIQSQLRKSRLGPQP

SEQ ID NO: 2105 - protein, 15 aa, Hepatitis B virus
TQGQLAGRPQGGSGS

SEQ ID NO: 2106 - protein, 15 aa, Hepatitis B virus
VEPSGSGHTHNCASS

SEQ ID NO: 2107 - protein, 15 aa, Hepatitis B virus
GSGHTHNCASSSSSC

SEQ ID NO: 2108 - protein, 15 aa, Hepatitis B virus
THNCASSSSSCLHQS

SEQ ID NO: 2109 - protein, 15 aa, Hepatitis B virus
LQPQQGSLARGKSGR

SEQ ID NO: 2110 - protein, 15 aa, Hepatitis B virus
QGSLARGKSGRSGSI

SEQ ID NO: 2111 - protein, 15 aa, Hepatitis B virus
ARGKSGRSGSIRARV

SEQ ID NO: 2112 - protein, 15 aa, Hepatitis B virus
SGRSGSIRARVHPTT

SEQ ID NO: 2113 - protein, 15 aa, Hepatitis B virus
GSIRARVHPTTRRSF

SEQ ID NO: 2114 - protein, 15 aa, Hepatitis B virus
VEPSGSGHIDNSASS

SEQ ID NO: 2115 - protein, 15 aa, Hepatitis B virus
GSGHIDNSASSASSC

SEQ ID NO: 2116 - protein, 15 aa, Hepatitis B virus
IDNSASSASSCLHQS

SEQ ID NO: 2117 - protein, 15 aa, Hepatitis B virus
KAAYPSVSTFEKHSS

SEQ ID NO: 2118 - protein, 15 aa, Hepatitis B virus
PSVSTFEKHSSSGHA

SEQ ID NO: 2119 - protein, 15 aa, Hepatitis B virus
TFEKHSSSGHAVELH

SEQ ID NO: 2120 - protein, 15 aa, Hepatitis B virus
KAAYSPISTSKGHSS

SEQ ID NO: 2121 - protein, 15 aa, Hepatitis B virus
SPISTSKGHSSSGHA

SEQ ID NO: 2122 - protein, 15 aa, Hepatitis B virus
TSKGHSSSGHAVELH

SEQ ID NO: 2123 - protein, 15 aa, Hepatitis B virus
HAVELHNLPPNSARS

SEQ ID NO: 2124 - protein, 15 aa, Hepatitis B virus
LHNLPPNSARSQSER

SEQ ID NO: 2125 - protein, 15 aa, Hepatitis B virus
PPNSARSQSERPVFP

SEQ ID NO: 2126 - protein, 15 aa, Hepatitis B virus
ARSQSERPVFPCWWL

SEQ ID NO: 2127 - protein, 15 aa, Hepatitis B virus
SERPVFPCWWLQFRN

SEQ ID NO: 2128 - protein, 15 aa, Hepatitis B virus
VFPCWWLQFRNSKPC

SEQ ID NO: 2129 - protein, 15 aa, Hepatitis B virus
HAVELHHFPPNSSRS

SEQ ID NO: 2130 - protein, 15 aa, Hepatitis B virus
LHHFPPNSSRSQSQG

SEQ ID NO: 2131 - protein, 15 aa, Hepatitis B virus
PPNSSRSQSQGSVLS

SEQ ID NO: 2132 - protein, 15 aa, Hepatitis B virus
SRSQSQGSVLSCWWL

SEQ ID NO: 2133 - protein, 15 aa, Hepatitis B virus
SQGSVLSCWWLQFRN

SEQ ID NO: 2134 - protein, 15 aa, Hepatitis B virus
HAVELHNIPPSSARS

SEQ ID NO: 2135 - protein, 15 aa, Hepatitis B virus
LHNIPPSSARSQSEG

SEQ ID NO: 2136 - protein, 15 aa, Hepatitis B virus
PPSSARSQSEGPIFS

SEQ ID NO: 2137 - protein, 15 aa, Hepatitis B virus
ARSQSEGPIFSCWWL

SEQ ID NO: 2138 - protein, 15 aa, Hepatitis B virus
KPCSDYCLSHIVNLL

SEQ ID NO: 2139 - protein, 15 aa, Hepatitis B virus
DYCLSHIVNLLEDWG

SEQ ID NO: 2140 - protein, 15 aa, Hepatitis B virus
SHIVNLLEDWGPCAE

SEQ ID NO: 2141 - protein, 15 aa, Hepatitis B virus
SQFSRGNYRVSWPKF

SEQ ID NO: 2142 - protein, 15 aa, Hepatitis B virus
SQFSRGSTHVSWPKF

SEQ ID NO: 2143 - protein, 15 aa, Hepatitis B virus
STSRNINYQHGTMQD

SEQ ID NO: 2144 - protein, 15 aa, Hepatitis B virus
NINYQHGTMQDLHDS

SEQ ID NO: 2145 - protein, 15 aa, Hepatitis B virus
SNSRIINHQHGTMQN

SEQ ID NO: 2146 - protein, 15 aa, Hepatitis B virus
NLYVSLLLLYQTFGR

SEQ ID NO: 2147 - protein, 15 aa, Hepatitis B virus
SLLLLYQTFGRKLHL

SEQ ID NO: 2148 - protein, 15 aa, Hepatitis B virus
LYQTFGRKLHLYSHP

SEQ ID NO: 2149 - protein, 15 aa, Hepatitis B virus
FGRKLHLYSHPIILG

SEQ ID NO: 2150 - protein, 15 aa, Hepatitis B virus
SVQHLESLFTSITNF

SEQ ID NO: 2151 - protein, 15 aa, Hepatitis B virus
LESLFTSITNFLLSL

SEQ ID NO: 2152 - protein, 15 aa, Hepatitis B virus
FTSITNFLLSLGIHL

SEQ ID NO: 2153 - protein, 15 aa, Hepatitis B virus
YVIGCYGSLPQDHII

SEQ ID NO: 2154 - protein, 15 aa, Hepatitis B virus
CYGSLPQDHIIQKIK

SEQ ID NO: 2155 - protein, 15 aa, Hepatitis B virus
LPQDHIIQKIKECFR

SEQ ID NO: 2156 - protein, 15 aa, Hepatitis B virus
QEHIVLKIKQCFRKL

SEQ ID NO: 2157 - protein, 15 aa, Hepatitis B virus
YKAFLCKQYLNLYPV

SEQ ID NO: 2158 - protein, 15 aa, Hepatitis B virus
TPTGWGLVMGHQRMR

SEQ ID NO: 2159 - protein, 15 aa, Hepatitis B virus
RSRSGANILGTDNSV

SEQ ID NO: 2160 - protein, 15 aa, Hepatitis B virus
GRLGLSRPLLRLPFR

SEQ ID NO: 2161 - protein, 15 aa, Hepatitis B virus
GRLGLYRPLLHLPFR

SEQ ID NO: 2162 - protein, 15 aa, Hepatitis B virus
GRLGLYRPLLRLPYR

SEQ ID NO: 2163 - protein, 10 aa, Hepatitis B virus
FLPSDFFPSV

SEQ ID NO: 2164 - protein, 9 aa, Hepatitis B virus
VLQAGFFLL

SEQ ID NO: 2165 - protein, 9 aa, Hepatitis B virus
FLLTRILTI

SEQ ID NO: 2166 - protein, 9 aa, Hepatitis B virus
LLCLIFLLV

SEQ ID NO: 2167 - protein, 10 aa, Hepatitis B virus
LLDYQGMLPV

SEQ ID NO: 2168 - protein, 9 aa, Hepatitis B virus
WLSLLVPFV

SEQ ID NO: 2169 - protein, 10 aa, Hepatitis B virus
LLVPFVQWFV

SEQ ID NO: 2170 - protein, 10 aa, Hepatitis B virus
GLSPTVWLSV

SEQ ID NO: 2171 - protein, 10 aa, Hepatitis B virus
LLPIFFCLWV

SEQ ID NO: 2172 - protein, 10 aa, Hepatitis B virus
YLHTLWKAGI

SEQ ID NO: 2173 - protein, 9 aa, Hepatitis B virus
NLSWLSLDV

SEQ ID NO: 2174 - protein, 9 aa, Hepatitis B virus
GLSRYVARL

SEQ ID NO: 2175 - protein, 9 aa, Hepatitis B virus
KLHLYSHPI

SEQ ID NO: 2176 - protein, 9 aa, Hepatitis B virus
LLAQFTSAI

SEQ ID NO: 2177 - protein, 9 aa, Hepatitis B virus
YMDDVVLGA

SEQ ID NO: 2178 - protein, 9 aa, Hepatitis B virus
YVDDVVLGA

SEQ ID NO: 2179 - protein, 9 aa, Hepatitis B virus
YIDDVVLGA

SEQ ID NO: 2180 - protein, 9 aa, Hepatitis B virus
FLLSLGIHL

SEQ ID NO: 2181 - protein, 9 aa, Hepatitis B virus
ALMPLYACI

SEQ ID NO: 2182 - protein, 9 aa, Hepatitis B virus
WILRGTSFV

SEQ ID NO: 2183 - protein, 10 aa, Hepatitis B virus
ILRGTSFVYV

SEQ ID NO: 2184 - protein, 543 aa, Simian immunodeficiency virus
MGVRNSVLSGKKADELEKIRLRPNGKKKYMLKHVVWAANELDRFGLAESLLENKEGCQKILSVLAPLVPTGSENLKSLYNTVCVIWCIHAEEKVKHTEEAKQIVQRHLVVETGTTETMPKTSRPTAPSSGRGGNYPVQQIGGNYVHLPLSPRTLNAWVKLIEEKKFGAEVVIEEKKFGAEVVPGFQALSEGCTPYDINQMLNCVGDHQAAMQIIRDIINEEAADWDLQHPQPAPQQGQLREPSGSDIAGTTSSVDEQIQWMYRQQNPIPVGNIYRRWIQLGLQKCVRMYNPTNILDVKQGPKEPFQSYVDRFYKSLRAEQTDAAVKNWMTQTLLIQNANPDCTLLIQNANPDCKLVLKGLGVNPTLEEMLTACQGVGGPGQKARLMAEALKEALAPVPIPFAAAQQRGPRKPIKCWNCGKEGHSARQCRAPRRQGCWKCGKMDHVMAKCPDRQAGFLGLGPWGKKPRNFPMAQVHQGLMPTAPPEDPAVDLLKNYMQLGKQQREKQRESREKPREKQRESREKPYKEVTEDLLHLNSLFGGDQ

SEQ ID NO: 2185 - protein, 1118 aa, Simian immunodeficiency virus
VLELWERGTLCKAMQSPKKTGMLEMWKNGPCYGQMPRQTGGFFRPWSMGKEAPQFPHGSSASGADANCSPRGPSCGSAKELHAVGQAAERKAERKQREALQGGDRGFAAPQFSLWRRPVVTAHIEGQPVEVLLDTGADDSIVTGIELGPHYTPKIVGGIGGFINTKEGFINTKEYKNVEIEVLGKRIKGTIMTGDTPINIFGRNLLTALGMSLNFPIAKVEPVKVALKPGKDGPKLKQWPLSKEKIVALREICEKMEKDGQLEEAPPTNPYNTPTFAIKKKDKNKWRMLIDFRELNRVTQDFTEVQLGIPHPAGLAKRKRITVLDIGDAYFSIPLDEEDAYFSIPLDEEFRQYTAFTLPSVNNAEPGKRYIYKVLPQGWKGSPAIFQYTMRHVLEPFRKANPDVTLVQYMDDILIASDRTDLEHDRVVLQSKELLNSIGFSTPEEKFQKDPPFQWMGYELWPTKWKLQKIELPQRETWTVNDIQKLVGVLNWAAQIYPGIKTKHLGIKTKHLCRLIRGKMTLTEEVQWTEMAEAEYEENKIILSQEQEGCYYQEGKPLEATVIKSQDNQWSYKIHQEDKILKVGKFAKIKNTHTNGVRLLAHVIQKIGKEAIVIWGQVPKFHLPVEKDVWEQWWTDYWQVTWIPEWDFISTPPLVRLVFNLVKDPIEGEETYYTDGIEGEETYYTDGSCNKQSKEGKAGYITDRGKDKVKVLEQTTNQQAELEAFLMALTDSGPKANIIVDSQYVMGIITGCPTESESRLVNQIIEEMIKKSEIYVAWVPAHKGIGGNQEIDHLVSQGIRQVLFLEKIEPAQEEHDKYHSNVKELVFKFGLPRIVARQIVDTCDKCHRQIVDTCDKCHQKGEAIHGQANSDLGTWQMDCTHLEGKIIIVAVHVASGFIEAEVIPQETGRQTALFLLKLAGRWPITHLHTDNGANFASQEVKMVAWWAGIEHTFGVPYNPQSQGVVEAMNHHLKNQIDRIREQANSVETIVLMAVHCMNFKRRGGIGDMTPAERLINMIMTPAERLINMITTEQEIQFQQSKNSKFKNFRVYYREGRDQLWKGPGELLWKGEGAVILKVGTDIKVVPRRKAKIIKDYGGGKEVDSSSHMEDTGEAREVA

SEQ ID NO: 2186 - protein, 92 aa, Simian immunodeficiency virus
MGGAISMRRSRPSGDLRQRLLRARGETYGRLLGEVEDGYSQSPGGLDKGLSSLSCEGQKYNQGQYMNTPWRNPAEEREKLAYRKQNMDDIDE

SEQ ID NO: 2187 - protein, 902 aa, Simian immunodeficiency virus
MRVKGIRKNYQHLWRGGTLLLGMLMICSAVEKLWVTVYYGVPAWKEATTTLFCASDAKAYDTEVHNVWATHACVPTDPNPQEIVLENVTENFNMWKNNMVEQMHEDIISLWDQSLEPCVKLTPLCVTLHCTNLENATNTTSSNWKEMNRGEIKNCSFNVTTSIGNKMQKETTSIGNKMQKEYALFYRLDVVPIDNDNTSYNLINCNTSVITQACPKVSFEPIPIHYCAPAGFAILKCNDKKFNGSGPCINVSTVQCTHGIRPVVSTQLLLNGSLAEEGVVIRSENFTDNVKTIIVQLKESVEINCTRPNNNTRKSIPIGPGKAFYATGDIIGDIRQAHCNIIGDIRQAHCNISGEKWNNTLKQIVTKLQAQFENKTIVFKQSSGGDPEIVMHSFNCGGEFFYCNSTQLFNSTWNNTIGPNNTNGTITLPCRIKQIINRWQEVGKAMYAPPIRGQIRCSSNITGLLLTRDGGREVGNTTEIFRPGGGDMRDNWRSELYKYKVVKIEPLGVYKVVKIEPLGVAPTKAKRRVVQREKRAVTLGAVFLGFLGAAGSTMGAASLTLTVQARQLLSGIVQQQNNLLRAIEAQQRLLQLTVWGIKQLQARVLAVERYLKDQQLLGIWGCSGKLICTTAVPWNASWSNKSLDQIWNNMTWMEWEREIGNYTNLIYTLIEESQNQQETLIEESQNQQEKNEQELLELDKWASLWNWLDISKWLWYIKIFIMIVGGLVGLRIVFTVLSIVNRVRQGYSPLSFQTRFPAPRGLDRPEGIEEEGGERDRDRSRPLVHGLLALIWDDLRSLCLFSYHRLRDLILIAARIVELLGRRGWEALKYWGNLLQYWIQELKNSAVSWIQELKNSAVSLFGAIAIAVAEGTDRIIEVAQRIGRAFLHIPRRIRQGLERTLL

SEQ ID NO: 2188 - protein, 533 aa, Human immunodeficiency virus type 1
MGARASVLSGGELDRWEKIRLRPGGKKKYKLKHIVWASRELERFAVNPGLLETSEGCRQILGQLQPSLQTGSEELRSLYNTVATLYCVHQRIEVKDTKEALEKIEEEQNKSKKKAQQAAADTGNSSQVSQNYPIVQNLQGQMVHQAISPRTLNAWVKVVEEKAFSPEVIPEEKAFSPEVIPMFSALSEGATPQDLNTMLNTVGGHQAAMQMLKETINEEAAEWDRLHPVHAGPIAPGQMREPRGSDIAGTTSTLQEQIGWMTNNPPIPVGEIYKRWIILGLNKIVRMYSPTSILDIRQGPKEPFRDYVDRFYKTLRAEQASQEVKNWMTETLLVQNANPDETLLVQNANPDCKTILKALGPAATLEEMMTACQGVGGPGHKARVLAEAMSQVTNSATIMMQRGNFRNQRKTVKCFNCGKEGHIAKNCRAPRKKGCWKCGKEGHQMKDCTERQANFLGKIWPSHKGRPGNFLQSRPEPTAPPEESFRFGEETTTPSQKQEPIDKELYPLAEPIDKELYPLASLRSLFGNDPSSQ

SEQ ID NO: 2189 - protein, 217 aa, Human immunodeficiency virus type 1
MGGKWSKRSVVGWPTVRERMRRAEPAADGVGAVSRDLEKHGAITSSNTAANNADCAWLEAQEEEEVGFPVRPQVPLRPMTYKAAVDLSHFLKEKGGLEGLIYSQKRQDILDLWVYHTQGYFPDWQNYTPGPGIRYPLTFGWCFKLVPVEPEKVEEANEGENNSLLHPMSLHNNSLLHPMSLHGMDDPEREVLVWKFDSRLAFHHMARELHPEYYKDC

SEQ ID NO: 2190 - protein, 1068 aa, Human immunodeficiency virus type 1
FFREDLAFPQGKAREFSSEQTRANSPTRRELQVWGRDNNSLSEAGADRQGTVSFSFPQITLWQRPLVTIKIGGQLKEALLDTGADDTVLEEMNLPGRWKPKMIGGIGGFIKVRQYDQILIEICGHKAIGTVLVGPTPVNIIGRNLLTQIGCTLNFPISPIETVPVKLKPGMETVPVKLKPGMDGPKVKQWPLTEEKIKALVEICTEMEKEGKISKIGPENPYNTPVFAIKKKDSTKWRKLVDFRELNKRTQDFWEVQLGIPHPAGLKKKKSVTVLDVGDAYFSVPLDKDFRKYTAFTIPSINNETPGIRYQYNVLPQGWKGSPAIFQSSMTKILEPFRKQNPKILEPFRKQNPDIVIYQYMDDLYVGSDLEIGQHRTKIEELRQHLLRWGFTTPDKKHQKEPPFLWMGYELHPDKWTVQPIVLPEKDSWTVNDIQKLVGKLNWASQIYAGIKVKQLCKLLRGTKALTEVIPLTEEAELELAENREILKEPVHGVYYDPSKDLIAEIQKQGQGQIAEIQKQGQGQWTYQIYQEPFKNLKTGKYARMRGAHTNDVKQLTEAVQKIATESIVIWGKTPKFKLPIQKETWEAWWTEYWQATWIPEWEFVNTPPLVKLWYQLEKEPIVGAETFYVDGAANRETKLGKAGYVTDRGRQKVVSLTDTTNQKTELQAIHLALQDSGLEVNIVLQDSGLEVNIVTDSQYALGIIQAQPDKSESELVSQIIEQLIKKEKVYLAWVPAHKGIGGNEQVDKLVSAGIRKVLFLDGIDKAQEEHEKYHSNWRAMASDFNLPPVVAKEIVASCDKCQLKGEAMHGQVDCSPGIWQLDCTHLEGKIILVAVHVASGYIEAEVIPAETGQEAEVIPAETGQETAYFLLKLAGRWPVKTIHTDNGSNFTSTTVKAACWWAGIKQEFGIPYNPQSQGVVESMNKELKKIIGQVRDQAEHLKTAVQMAVFIHNFKRKGGIGGYSAGERIVDIIATDIQTKELQKQITKIQNFRVYRDSRDPLWKGPAKLLWKGEGAVVIQDNSDIGAVVIQDNSDIKVVPRRKAKIIRDYGKQMAGDDCVASRQDED

SEQ ID NO: 2191 - protein, 117 aa, Human immunodeficiency virus type 1
MAGRSGDSDEELLKTVRLIKFLYQSNPPPSPEGTRQARRNRRRRWRERQRQIRSISEWILSTYLGRPAEPVPLQLPPLERLTLDCNEDCGTSGTQGVGSPQILVESPAVLESGTKEE

SEQ ID NO: 2192 - protein, 102 aa, Human immunodeficiency virus type 1
MEPVDPRLEPWKHPGSQPKTACTNCYCKKCCFHCQVCFITKGLGISYGRKKRRQRRRAPQDSQTHQVSLSKQPASQPRGDPTGPKESKKKVERETETDPVDQ

SEQ ID NO: 2193 - protein, 203 aa, Human immunodeficiency virus type 1
MENRWQVMIVWQVDRMRIRTWKSLVKHHMYISRKAKGWFYRHHYESTHPRISSEVHIPLGDARLVITTYWGLHTGERDWHLGQGVSIEWRKKRYSTQVDPDLADQLIHLYYFDCFSESAIRNAILGHIVSPRCEYQAGHNKVGSLQYLALAALITPKKIKPPLPSVTKLTEPPLPSVTKLTEDRWNKPQKTKGHRGSHTMNGH

SEQ ID NO: 2194 - protein, 96 aa, Human immunodeficiency virus type 1
MEQAPEDQGPQREPYNEWTLELLEELKSEAVRHFPRIWLHGLGQHIYETYGDTWAGVEAIIRILQQLLFIHFRIGCQHSRIGITRQRRARNGASRS

SEQ ID NO: 2195 - protein, 81 aa, Human immunodeficiency virus type 1
MQSLQILAIVALVVAAIIAIVVWSIVFIEYRKILRQRKIDRLIDRIRERAEDSGNESEGDQEELSALVEMGHHAPWDVDDL

SEQ ID NO: 2196 - protein, 3261 aa, Hepatitis C virus
MSTNPKPQRKTKRNTNRRPQDVKFPGGGQIVGGVYLLPRRGPRLGVRATRKTSERSQPRGRRQPIPKARRPEGRTWAQPGYPWPLYGNEGCGWAGWLLSPRGSRPSWGPTDPRRRSRNLGKVIDTLTCGFADLMGYIPLVGAPLGGAARALGAPLGGAARALAHGVRVLEDGVNYATGNLPGCSFSIFLLALLSCLTVPASAYQVRNSSGLYHVTNDCPNSSIVYEAADAILHTPGCVPCVREGNASRCWVAVTPTVATRNASRCWVAVTPTVATRDGKLPTTQLRRHIDLLVGSATLCSALYVGDLCGSVALYVGDLCGSVFLVGQLFTFSPRRHWTTQDCNCSIYPGHITGHRMAWDMMMNWSPTAALVVAQLLRIPQAIMDMIAGAHWGVLAGIAYFSMVGNWAKVLVVLLLFAGVDAETHVTGGSAGRTTAGLVGLLTPGAKQNIQLINTNGSWHINSINTNGSWHINSTALNCNESLNTGWLAGLFYQHKFNSSGCPERLASCRRLTDFAQGWGPISYANGSGLDERPYCWHYPPRPCGIVPAKSVCGPVYCFTPSPVVVGTTDRSGAPTYSWGANDTDVFVLNNTRPPLGNWFGCTWMNSTGFTKVCWMNSTGFTKVCGAPPCVIGGVGNNTLLCPTDCFRKHPEATYSRCGSGPWITPRCMVDYPYRLWHYPCTINYTIFKVRMYVGGVEHRLEAACNWTRGERCDLEDRDRSELSPLLLSTTQWQVLPCSFTTLPALSTGLIHLHQNIVDVQYLYGQNIVDVQYLYGVGSSIASWAIKWEYVVLLFLLLADARVCSCLWMMLLISQAEAALENLVILNAASLAGTHGLVSFLVFFCFAWYLKGRWVPGAVYAFYGMWPLLLLLLALPQRAYALDTEVAASCGGVVLVGLMALTLSPYYKRYISWCMWYYKRYISWCMWWLQYFLTRVEAQLHVWVPPLNVRGGRDAVILLMCVVHPTLVFDITKLLLAIFGPLWILQASLLKVPYFVRVQGLLRICALARKIAGGHYVQMAIIKLGALTGTYVYNHLTPLRDWAHNGLRDLAVAVEPVVFSRMETKLIVVFSRMETKLITWGADTAACGDIINGLPVSARRGQEILLGPADGMVSKGWRLLAPITAYAQQTRGLLGCIITSLTGRDKNQVEGEVQIVSTATQTFLATCINGVCWTVYHGAGTRTIASPKGPVIQMYTNVDQDLVGWPAPQGSDLVGWPAPQGSRSLTPCTCGSSDLYLVTRHADVIPVRRRGDSRGSLLSPRPISYLKGSSGGPLLCPAGHAVGLFRAAVCTRGVAKAVDFIPVENLETTMRSPVFTDNSSPPAVPQSFQVAHLHAPTGSGKSTKVPAAYAAQGYKVLVLNPSQGYKVLVLNPSVAATLGFGAYMSKAHGVDPNIRTGVRTITTGSPITYSTYGKFLADGGCSGGAYDIIICDECHSTDATSILGIGTVLDQAETAGARLVVLATATPPGSVTVSHPNIEEVALSTTGEIPFYGKAIPLEVIKGGRHLIFCHSKGGRHLIFCHSKKKCDELAAKLVALGINAVAYYRGLDVSVIPTSGDVVVVSTDALMTGFTGDFDSVIDCNTCVTQTVDFSLDPTFTIETTTLPQDAVSRTQRRGRTGRGKPGIYRFVAPGERPSGMFDSSVLCECYDAGCAWYELTPAEGCAWYELTPAETTVRLRAYMNTPGLPVCQDHLEFWEGVFTGLTHIDAHFLSQTKQSGENFPYLVAYQATVCARAQAPPPSWDQMWKCLIRLKPTLHGPTPLLYRLGAVQNEVTLTHPITKYIMTCMSADLEVVTSTWVLVGGVLAALWVLVGGVLAALAAYCLSTGCVVIVGRIVLSGKPAIIPDREVLYQEFDEMEECSQHLPYIEQGMMLAEQFKQKALGLLQTASRQAEVITPAVQTNWQKLEVFWAKHMWNFISGIQYLAGLSTLPGNPAIASLMAFTAAAIASLMAFTAAVTSPLTTGQTLLFNILGGWVAAQLAAPGAATAFVGAGLAGAAIGSVGLGKVLVDILAGYGAGVAGALVAFKIMSGEVPSTEDLVNLLPAILSPGALVVGVVCAAILRRHVGPGEGAVQWMNRLIAFASRGNHVSPTHYVPGNHVSPTHYVPESDAAARVTAILSSLTVTQLLRRLHQWISSECTTPCSGSWLRDIWDWICEVLSDFKTWLKAKLMPQLPGIPFVSCQRGYRGVWRGDGIMHTRCHCGAEITGHVKNGTMRIVGPRTCRNMWSGTFPINAYTTGPCTPLPAPTTGPCTPLPAPNYKFALWRVSAEEYVEIRRVGDFHYVSGMTTDNLKCPCQIPSPEFFTELDGVRLHRFAPPCKPLLREEVSFRVGLHEYPVGSQLPCEPEPDVAVLTSMLTDPSHITAEAAGRRLARGSPPSMASSSASQLSAPSLKATCTLSAPSLKATCTANHDSPDAELIEANLLWRQEMGGNITRVESENKVVILDSFDPLVAEEDEREVSVPAEILRKSRRFARALPVWARPDYNPPLVETWKKPDYEPPVVHGCPLPPPRSPPVPPPRKKRTVVLTESTLSTALAELATKSFGSSSELATKSFGSSSTSGITGDNTTTSSEPAPSGCPPDSDVESYSSMPPLEGEPGDPDLSDGSWPGDSTVSSGADTEDVVCCSMSYSWTGALVTPCAAEEQKLPINALSNSLLRHHNLVYSTTSRSACQRYSTTSRSACQRQKKVTFDRLQVLDSHYQDVLKEVKAAASKVKANLLSVEEACSLTPPHSAKSKFGYGAKDVRCHARKAVAHINSVWKDLLEDSVTPIDTTIMAKNEVFCVQPEKGGRKPARLIVFPDLGVRVCEKMALYDVVSKLPLAVMGVVSKLPLAVMGSSYGFQYSPGQRVEFLVQAWKSKKTPMGFSYDTRCFDSTVTESDIRTEEAIYQCCDLDPQARVAIKSLTERLYVGGPLTNSRGENCGYRRCRASGVLTTSCGNTLTCYIKARAACRAAGLQDCTMLVCGDDLVVICESAGDDLVVICESAGVQEDAASLRAFTEAMTRYSAPPGDPPQPEYDLELITSCSSNVSVAHDGAGKRVYYLTRDPTTPLARAAWETARHTPVNSWLGNIIMFAPTLWARMILMTHFFSVLIARDQLEQALNCEIYGACYSIEPLDLPPCYSIEPLDLPPIIQRLHGLSAFSLHSYSPGEINRVAACLRKLGVPPLRAWRHRARSVRARLLSRGGRAAICGKYLFNWAVRTKLKLTPIAAAGRLDLSGWFTAGYSGGDIYHSVSHARPRWFWFCLLLLAAGVGIYLLPNR

SEQ ID NO: 2197 - protein, 215 aa, Human immunodeficiency virus type 1
KVKQWPLTEEKIKALVEICTEMEKEGKISKIGPENPYNTPVFAIKKKDSTKWRKLVDFRELNKRTQDFWEVQLGIPHPAGLKKKKSVTVLDVGDAYFSVPLDKDFRKYTAFTIPSINNETPGIRYQYNVLPQGWKGSPAIFQSSMTKILEPFRKQNPDIVIYQYMDDLYVGSDLEIGQHRTKIEELRQHLLRWGFTTPDKKHQKEPPFLWMGYEL

SEQ ID NO: 2198 - protein, 17 aa, Artificial
  HIV-1 RT peptide 1
ALVEICTELEKEGKISK

SEQ ID NO: 2199 - protein, 17 aa, Artificial
  HIV-1 RT peptide 2
EICTEMEKDGKISKIGP

SEQ ID NO: 2200 - protein, 17 aa, Artificial
  HIV-1 RT peptide 3
NTPVFAIKRKDSTKWRK

SEQ ID NO: 2201 - protein, 17 aa, Artificial
  HIV-1 RT peptide 4
PVFAIKKKNSTKWRKLV

SEQ ID NO: 2202 - protein, 17 aa, Artificial
  HIV-1 RT peptide 5
FAIKKKDSDKWRKLVDF

SEQ ID NO: 2203 - protein, 17 aa, Artificial
  HIV-1 RT peptide 6
AIKKKDSTRWRKLVDFR

SEQ ID NO: 2204 - protein, 17 aa, Artificial
  HIV-1 RT peptide 7
KDSTKWRKVVDFRELNK

SEQ ID NO: 2205 - protein, 17 aa, Artificial
  HIV-1 RT peptide 8
DSTKWRKLTDFRELNKR

SEQ ID NO: 2206 - protein, 17 aa, Artificial
  HIV-1 RT peptide 9
VQLGIPHPGGLKKKKSV

SEQ ID NO: 2207 - protein, 17 aa, Artificial
  HIV-1 RT peptide 10
PHPAGLKKNKSVTVLDV

SEQ ID NO: 2208 - protein, 17 aa, Artificial
  HIV-1 RT peptide 11
DVGDAYFSIPLDKDFRK

SEQ ID NO: 2209 - protein, 17 aa, Artificial
  HIV-1 RT peptide 12
RYQYNVLPMGWKGSPAI

SEQ ID NO: 2210 - protein, 17 aa, Artificial
  HIV-1 RT peptide 13
KQNPDIVICQYMDDLYV

SEQ ID NO: 2211 - protein, 17 aa, Artificial
  HIV-1 RT peptide 14
PDIVIYQYVDDLYVGSD

SEQ ID NO: 2212 - protein, 17 aa, Artificial
  HIV-1 RT peptide 15
PDIVIYQYIDDLYVGSD

SEQ ID NO: 2213 - protein, 17 aa, Artificial
  HIV-1 RT peptide 16
IYQYMDDLLVGSDLEIG

SEQ ID NO: 2214 - protein, 17 aa, Artificial
  HIV-1 RT peptide 17
QYMDDLYVASDLEIGQH

SEQ ID NO: 2215 - protein, 17 aa, Artificial
  HIV-1 RT peptide 18
IEELRQHLWRWGFFTPD

SEQ ID NO: 2216 - protein, 17 aa, Artificial
  HIV-1 RT peptide 19
QHLLRWGFFTPDKKHQK

SEQ ID NO: 2217 - protein, 17 aa, Artificial
  HIV-1 RT peptide 20
QHLLRWGFYTPDKKHQK

SEQ ID NO: 2218 - protein, 17 aa, Artificial
  HIV-1 RT peptide 21
RWGFTTPDQKHQKEPPF

SEQ ID NO: 2219 - protein, 99 aa, Human immunodeficiency virus type 1
PQITLWQRPLVTIKIGGQLKEALLDTGADDTVLEEMNLPGRWKPKMIGGIGGFIKVRQYDQILIEICGHKAIGTVLVGPTPVNIIGRNLLTQIGCTLNF

SEQ ID NO: 2220 - protein, 17 aa, Artificial
  HIV-1 protease peptide 1
QITLWQRPIVTIKIGGQ

SEQ ID NO: 2221 - protein, 17 aa, Artificial
  HIV-1 protease peptide 2
TIKIGGQLREALLDTGA

SEQ ID NO: 2222 - protein, 17 aa, Artificial
  HIV-1 protease peptide 3
ALLDTGADNTVLEEMNL

SEQ ID NO: 2223 - protein, 17 aa, Artificial
  HIV-1 protease peptide 4
LPGRWKPKIIGGIGGFI

SEQ ID NO: 2224 - protein, 17 aa, Artificial
  HIV-1 protease peptide 5
GRWKPKMIVGIGGFIKV

SEQ ID NO: 2225 - protein, 17 aa, Artificial
  HIV-1 protease peptide 6
WKPKMIGGVGGFIKVRQ

SEQ ID NO: 2226 - protein, 17 aa, Artificial
  HIV-1 protease peptide 7
KMIGGIGGLIKVRQYDQ

SEQ ID NO: 2227 - protein, 17 aa, Artificial
  HIV-1 protease peptide 8
MIGGIGGFVKVRQYDQI

SEQ ID NO: 2228 - protein, 17 aa, Artificial
  HIV-1 protease peptide 9
KVRQYDQIPIEICGHKA

SEQ ID NO: 2229 - protein, 17 aa, Artificial
  HIV-1 protease peptide 10
TVLVGPTPANIIGRNLL

SEQ ID NO: 2230 - protein, 17 aa, Artificial
  HIV-1 protease peptide 11
TVLVGPTPTNIIGRNLL

SEQ ID NO: 2231 - protein, 17 aa, Artificial
  HIV-1 protease peptide 12
LVGPTPVNVIGRNLLTQ

SEQ ID NO: 2232 - protein, 17 aa, Artificial
  HIV-1 protease peptide 13
VNIIGRNLMTQIGCTLN

1-52. (canceled)

53. A composition of matter for modulating an immune response in a subject to a target antigen, the composition comprising uncultured antigen-presenting cells or their precursors, which have not been subjected to activating conditions, and which have been contacted with an antigen corresponding to the target antigen for a time and under conditions sufficient to express a processed or modified form of the antigen for presentation to the subject's immune system.

54. A composition according to claim 53, wherein the uncultured antigen-presenting cells or their precursors are contacted with the antigen from about 1 minute to about 5 days.

55. A composition according to claim 53, wherein the uncultured antigen-presenting cells or their precursors are selected from whole blood, fresh blood, or fractions thereof.

56. A composition according to claim 55, wherein fractions are selected from peripheral blood mononuclear cells, buffy coat fractions of whole blood, packed red cells, irradiated blood, dendritic cells, monocytes, macrophages, neutrophils, lymphocytes, natural killer cells and natural killer T cells.

57. A composition according to claim 53, wherein the antigen corresponding to the target antigen is selected from: nucleic acids; peptides; hormones; whole protein antigens; cellular material; particulate matter selected from cell debris, apoptotic cells, lipid aggregates, membranous vehicles, microspheres, heat aggregated proteins, virosomes, virus-like particles; and whole organisms selected from bacteria, mycobacteria, viruses, fungi, protozoa or parts thereof.

58. A composition according to claim 53, wherein the antigen is selected from a proteinaceous molecule or a nucleic acid molecule.

59. A composition according to claim 53, wherein the uncultured cells are contacted with two or more antigens.

60. A composition according to claim 59, wherein the antigens are in a form selected from overlapping peptides, non-overlapping peptides, one or more polynucleotides from which overlapping peptides are expressible or one or more polynucleotides from which non-overlapping peptides are expressible.

61. A composition according to claim 53, wherein the uncultured cells are contacted with at least one set of peptides, wherein individual peptides of a respective set comprise different portions of an amino acid sequence corresponding to a single polypeptide of interest and display partial sequence identity or similarity to at least one other peptide of the same set of peptides.

62. A composition according to claim 61, wherein at least 2 sets of peptides are employed, and wherein peptide sequences in each set are derived from a distinct polypeptide of interest.

63. A composition according to claim 61, wherein the partial sequence identity or similarity is contained at one or both ends of an individual peptide.

64. A composition according to claim 61, wherein the length of the peptides is selected to enhance the production of a cytolytic T lymphocyte response.

65. A composition according to claim 61, wherein the length of the peptides is selected to enhance the production of r a T helper lymphocyte response.

66. A composition according to claim 61, wherein the peptide sequences are derived from at least about 30% of the sequence corresponding to the polypeptide of interest.

67. A composition according to claim 61, wherein the polypeptide of interest is an antigen selected from a protein antigen, an antigen expressed by cancer cells, a particulate antigen, an alloantigen, an autoantigen or an allergen, or an immune complex.

68. A composition according to claim 61, wherein the polypeptide of interest is a polypeptide producted by a pathogenie organism or a cancer.

69. A process for producing antigen-presenting cells for modulating an immune response to a polypeptide of interest, the process comprising contacting a population of uncultured antigen-presenting cells or their precursors, which have not been subjected to activating conditions, with an antigen corresponding to the target antigen for a time and under conditions sufficient to express a processed or modified form of the antigen for presentation to the subject's immune system.

70. A process according to claim 69, wherein the population is a heterogeneous population selected from whole blood, fresh blood, or fractions thereof selected from peripheral blood mononuclear cells, buffy coat fractions of whole blood, packed red cells, irradiated blood, dendritic cells, monocytes, macrophages, neutrophils, lymphocytes, natural killer cells or natural killer T cells.

71. A method for modulating an immune response to a target antigen, comprising administering to a patient in need of such treatment a composition according to claim 53 or a population of uncultured antigen-presenting cells produced according to the process of claim 69.

72. A method for treatment and/or prophylaxis of a disease or condition associated with the presence of a target antigen of interest, comprising administering to a patient in need of such treatment or prophylaxis an effective amount of antigen-presenting cells or their precursors, which have not been subjected to activating conditions and which have been contacted with an antigen that corresponds to the target antigen for a time and under conditions sufficient to express a processed or modified form of the antigen for presentation to the subject's immune system.
